(19) United States
(12) Patent Application Publication
(10) Pub. No.: US 2022/0170028 A1
(43) Pub. Date: Jun. 2, 2022

(54) NOVEL INTERLEUKIN-2 VARIANTS AND BIFUNCTIONAL FUSION MOLECULES THEREOF

(71) Applicant: Cugene Inc, Waltham, MA (US)

(72) Inventors: Yue-Sheng Li, Thousand Oaks, CA (US); Lingyun Rui, Weston, MA (US); Jing Xu, Waltham, MA (US)

(21) Appl. No.: 17/618,207

(22) PCT Filed: Jun. 13, 2020
(86) PCT No.: PCT/US20/37648

§ 371 Date: Dec. 10, 2021

Related U.S. Application Data
(60) Provisional application No. 62/861,484, filed on Jun. 14, 2019.

(51) Int. Cl. C12N 15/62; C07K 14/705; C07K 14/55

(52) U.S. Cl. CPC C12N 15/62; C07K 16/2803; C07K 14/55; C07K 14/70578

(57) ABSTRACT

The present invention relates to bifunctional fusion molecules for therapy of autoimmune and various inflammatory disorders, cancer or cancer metastasis. The bifunctional fusion molecules comprise various IL-2 variants which comprise mutations that preferentially promotes the proliferation, survival, activation and/or function of immunosuppressive regulatory T cells ((T CD4+CD25+FoxP3+) over effector T cells and NK cells or IL-2 variants which comprise mutations substantially reduce the ability of these polypeptides to stimulate Treg cells and make them more effective in the therapy of tumors. The bifunctional fusion molecules further comprise a disease tissue targeting biologic or comprise a tumor associated antigen (TAA)-targeting biologic. In another aspect the present invention relates to pharmaceutical compositions comprising the polypeptides disclosed. Finally, the present invention relates to the therapeutic use of the polypeptides and pharmaceutical compositions disclosed due to their selective modulating effect of the immune system on diseases like autoimmune and inflammatory disorders or cancer and various infectious diseases.

### RELATED PATENT APPLICATIONS

[0001] This application claims benefit of U.S. Provisional Application No. 62/861,484, filed on Jun. 14, 2019, each incorporated in its entirety by reference herein.

### BACKGROUND ART

[0002] Interleukin 2 (IL-2) was the first growth factor described for T cells. Since its discovery it has been shown to promote proliferation and survival of T cells in vitro (Smith, K A. (1988) Science. 240, 1169-76) and the ability to boost immune response in the context of T viral infections (Blattman, J N, et al. (2003) Nat Med 9, 540-7) or vaccines (Fishman, M., et al. (2008) J Immunother. 31, 72-80, Kudo-Saito, C., et al. (2007) Cancer Immunol Immunother. 56, 1897-910; Lin, C T., et al. (2007) Immunol Lett. 114, 86-93).

[0003] IL-2 has been used in cancer therapy. Recombinant human IL-2 is an effective immunotherapy for metastatic melanoma and renal cancer, with durable responses in approximately 10% of patients. However short half-life and severe toxicity limits the optimal dosing of IL-2. Further, IL-2 also binds to its heterotrimeric receptor IL-2Rαβγ with greater affinity, which preferentially expands immunosuppressive regulatory T cells (Tregs) expressing high constitutive levels of IL-2Rα. Expansion of Tregs represents an undesirable effect of IL-2 for cancer immunotherapy. However, the capability of IL-2 to stimulate Treg cells even at low doses could be harnessed for the treatment of autoimmune and various inflammatory disorders.

[0004] Treg are central to immune system homeostasis and play a major role in maintaining peripheral immune tolerance by dampening (autoreactive) effector T cells. Multiple autoimmune and inflammatory diseases have been shown to have a deficiency of Treg cell numbers or Treg function. Consequently, there is great interest in the development of therapies that boost the numbers and/or function of Treg cells. One treatment approach for autoimmune diseases being investigated is employing low dose IL-2 to target Treg cells, because Treg cells respond to lower concentrations of IL-2 than many other immune cell types due to their high constitutive levels of IL-2Rα. (Klatzmann D, 2015 Nat Rev Immunol. 15:283-94). Clinical trials of low-dose IL-2 treatment of various GVHD (Koreth, J., et at., 2011, N Engl J Med., 365:2055-66) and HCV-associated autoimmune vasculitis patients (Saadoum, D., et al., 2011, N Engl J Med., 365:2067-77) have demonstrated increased Treg levels and signs of clinical efficacy. However, even these lower doses resulted in severe safety and tolerability issues. Therefore, there is need for an effective autoimmune/inflammatory disease therapy that can potentiate Treg cell numbers and function, that targets Treg cells more specifically than IL-2.

[0005] More recently, it was found that IL-2 could be modified to selectively stimulate either cytotoxic effector T cells or Treg cells. Various approaches have led to the generation of IL-2 variants with improved and selective immune stimulatory capacities. Some of these IL-2 variants were designed to increase the capacity of this molecule to signal mainly by the high affinity receptor (alpha, beta and gamma chains) and not by the intermediate affinity receptor (beta and gamma chains). The basic idea was to promote signaling in T cells instead of signaling in NK cells, which were believed to be responsible for the observed toxic effects. The following inventions are in this line of work: U.S. Pat. Nos. 7,186,804, 7,105,653, 6,955,807, 5,229,109, U.S. Patent Application 20050142106. It is important to note that none of these inventions relates to variants of IL-2 that have greater therapeutic efficacy than the native IL-2 in vivo, based on their decreased ability to stimulate natural regulatory T cells. However, since the initial studies of the IL-2 variants, research in the field more fully established that Treg cells constitutively express high IL-2Rα (CD25) along with IL-2Rβ and γ_{C}, and these available variants and the similarly derived IL-2 variants as IL-2Rαβγ selective agonists should be selective for Treg cells.

[0006] In summary, IL-2 is a highly pleiotropic cytokine which is very relevant in the biological activity of different cell populations. This property makes the IL-2 an important node in the regulation of the immune response, making it an attractive target for therapies and complex immune modulation. Further, receptor subunit-biased IL-2 variants can be made to achieve IL-2 mediated selective immune modulation to promote the expansion and activity of regulatory T-cells (Treg) while minimizing cytotoxic T effector (Teff) cells and led to lower levels of proinflammatory signaling molecules. On the other hand, receptor subunit-biased IL-2 variants can be made to achieve IL-2 mediated selective immune modulation to preferentially expand and activate Teff cells to attack cancer cells while reducing Treg cell expansion and activation.

### DISCLOSURE OF THE INVENTION

[0007] In one aspect, the present invention relates to the production of mutated variants of IL-2. These variants are characterized by their enhanced selectivity in stimulating Treg (T CD4+CD25+FoxP3+) cells over cytotoxic effector lymphocytes, including CD8+ T cells and NK cells. Specifically, these variants will provide a practical solution to improve IL-2 therapy in autoimmune and inflammatory disorders. The present invention relates to polypeptide which share their primary sequence with the human IL-2, expect for one to several amino acids that have been mutated. These variants have amino acid substitutions which reduce their affinity for IL-2Rβ and/or γ_{C}, and consequently these variants have reduced affinity for the IL-2Rβγ receptor complex and reduced or abolished ability to activate IL-2Rβγ-expressing cells but retain the ability to bind IL-2Rα and the ability to bind and activate the IL-2Rαβγ receptor complex. The present invention also includes therapeutic uses of these mutated variants, alone, or in combination with disease tissue-targeting biologics, or using disease tissue-targeting biologics as part of bifunctional fusion molecule, for the treatment of autoimmune as well as various inflammatory disorders.

[0008] In one aspect, the present invention relates to the production of mutated variants of IL-2, which are characterized by removing a proposed ‘¹⁹LDL’ motif resembling a component of bacterial toxins (Baluna R, Rizo et. al., Proc Natl Acad Sci 1999; 96:3957-62). This ‘toxic motif’ is responsible, in part, for direct vascular toxicity of IL-2. the mutations introduced remove the critical residue, D20, or the flanking two residues of the toxin-like domain, is expected to eliminate the toxic motif and prevent endothelial cell damage and significantly reduce VLS. Significantly, as this motif is located at the interface with IL-2Rβ, the amino acid substitutions to this motif reduce their affinity for IL-2Rβ, and the resulting molecule would be expected to have two beneficial properties, including selectivity for activated Treg cells and reduced endothelial damage. The present invention relates to polypeptides which share their primary sequence with the human IL-2, except for several amino acids that have been mutated. The present invention also includes therapeutic uses of these mutated variants, alone, or in combination with disease tissue-targeting biologics, or using disease tissue-targeting biologics as part of bifunctional fusion molecule, for therapy of autoimmune and various inflammatory disorders.

[0009] In one aspect, the present invention relates to the production of mutated variants of IL-2, which are characterized by being selective agonists of IL-2 activity with reduced or abolished binding capability to IL-2Rα. Specifically, these variants will provide a way to overcome the limitations observed in native IL-2 therapy which are derived from their proven ability to expand in vivo natural regulatory T cells. The present invention relates to polypeptides which share their primary sequence with the human IL-2, except for several amino acids that have been mutated. The mutations introduced substantially reduce the ability of these polypeptides to stimulate Treg cells and give IL-2 a greater efficacy. The present invention also includes therapeutic uses of these mutated variants, alone or in combination with vaccines, with immune checkpoint inhibitors, with tumor associated antigen (TAA)-targeting biologics or using disease tissue-targeting biologics as part of the bifunctional fusion construct for therapy of diseases such as cancer or infections where the activity of regulatory T cells (Tregs) is undesirable.

[0010] In one aspect, the present invention relates to the production of mutated variants of IL-2, which are characterized by the reduction of severe toxicity, such as vascular leak syndrome (VLS), associated with high dose IL-2 in clinical for treatment of renal carcinoma and melanoma. Specifically, the mutations introduced substantially reduce binding ability to IL-2Rα (CD25); consequently, impair binding to CD25+ pulmonary endothelial cells, and is expected to prevent endothelial cell damage and significantly reduce VLS. The present invention relates to polypeptides which share their primary sequence with the human IL-2, except for several amino acids that have been mutated. The present invention also includes therapeutic uses of these mutated variants, alone or in combination with vaccines, with immune checkpoint modulators, with tumor associated antigen (TAA)-targeting biologics or using disease tissue-targeting biologics as part of the bifunctional fusion construct for therapy of diseases such as cancer or infections to improve safety profile and increase efficacy.

[0011] The present invention allows for a substantial improvement of the current strategies of immunomodulation based on IL-2 in the therapy of autoimmune and various inflammatory disorders. Specifically, the replacement of the native IL-2 by the mutated variants described herein, will result in CD25-biased selective stimulation of Treg cells. In various embodiments, the IL-2 variant (or mutant) comprises the sequence of the IL-2 variant (or mutant) derived from the sequence of the mature human IL-2 polypeptide as set forth in SEQ ID NO: 3. In various embodiments, the IL-2 variant functions as an IL-2 agonist. In various embodiments, the IL-2 variant functions as an IL-2 antagonist. In various embodiments, the IL-2 variants comprise the sequences set forth in SEQ ID NOS: 4-43, 113-151, 208-212, and 275-292.

[0012] The present invention allows for a substantial improvement of the current strategies of immunomodulation based on IL-2 in the therapy of autoimmune and various inflammatory disorders. Specifically, the replacement of the native IL-2 by the mutated variants described herein, will result in CD25-biased selective stimulation of Treg cells and is expected to eliminate the toxic motif and prevent endothelial cell damage and significantly reduce VLS. In various embodiments, the IL-2 variant (or mutant) comprises the sequence of the IL-2 variant (or mutant) derived from the sequence of the mature human IL-2 polypeptide as set forth in SEQ ID NO: 3. In various embodiments, the IL-2 variant functions as an IL-2 agonist. In various embodiments, the IL-2 variant functions as an IL-2 antagonist. In various embodiments, the IL-2 variants comprise SEQ ID NOS: 5-14, 26-43, 113-116, 130-151, 208-212, and 275-292.

[0013] The present invention allows for a substantial improvement of the current strategies of immunomodulation based on IL-2 in the therapy of cancer. Specifically, the replacement of the native IL-2 by the mutated variants described herein, will result in IL-2Rβ-directed preferential stimulation of cytotoxic effector cells, and is expected to impair binding to CD25+ pulmonary endothelial cells and consequently reduce VLS. In various embodiments, the IL-2 variant (or mutant) comprises the sequence of the IL-2 variant (or mutant) derived from the sequence of the mature human IL-2 polypeptide as set forth in SEQ ID NO: 3. In various embodiments, the IL-2 variant functions as an IL-2 agonist. In various embodiments, the IL-2 variant functions as an IL-2 antagonist. In various embodiments, the IL-2 variants comprise SEQ ID NOS: 220-234 and 293-299.

[0014] The present invention also includes therapeutic uses of these mutated variants, alone, or in combination with disease tissue-targeting biologics, or using disease tissue-targeting biologics as part of bifunctional fusion molecule, for therapy of autoimmune and various inflammatory disorders, cancer or cancer metastasis to increase efficacy.

[0015] In another aspect, the IL-2 variants of the present invention are attached to at least one heterologous protein. In various embodiments, 11-2 variants are fused to at least one polypeptide that confers extended half-life on the fusion molecule. Such polypeptides include an IgG Fc or other polypeptides that bind to the neonatal Fey/receptor, human serum albumin, or polypeptides that bind to a protein having extended serum half-life. In various embodiments, the IL-2 variant is fused to an IgG Fc molecule. In various embodiments, the Fc domain is a human IgG Fc domain. In various embodiments, the Fc domain is derived from the human IgG1 heavy chain constant domain sequence set forth in SEQ ID NO: 44. In various embodiments, the Fc domain is an Fc domain having the amino acid sequence set forth in SEQ ID NO: 45. In various embodiments, the Fc domain is derived from the human IgG2 heavy chain constant domain sequence. In various embodiments, the Fc domain is derived from the human IgG4 heavy chain constant domain sequence.

[0016] In various embodiments, the IL-2 variants can be linked to the N-terminus or the C-terminus of the IgG Fc region.

[0017] The term “Fc” refers to molecule or sequence comprising the sequence of a non-antigen-binding fragment of whole antibody, whether in monomeric or multimeric form. The original immunoglobulin source of the native Fc is preferably of human origin and may be any of the immunoglobulins disclosed in the art. Native Fc's are made up of monomeric polypeptides that may be linked into dimeric or multimeric forms by covalent (i.e., disulfide bonds) and non-covalent association. The number of intermolecular disulfide bonds between monomeric subunits of native Fc molecules ranges from 1 to 4 depending on class (e.g., IgG, IgA, IgE) or subclass (e.g., IgG1, IgG2, IgG3, IgA1, IgGA2). One example of a native Fc is a disulfide-bonded dimer resulting from papain digestion of an IgG (see Ellison et al. (1982), Nucleic Acids Res. 10: 4071-9). The term “native Fc” as used herein is generic to the monomeric, dimeric, and multimeric forms. Fc domains containing binding sites for Protein A, Protein G, various Fc receptors and complement proteins.

[0018] In various embodiments, the term “Fc variant” refers to a molecule or sequence that is modified from a native Fc but still comprises a binding site for the salvage receptor, FcRn. International applications WO 97/34631 (published Sep. 25, 1997) and WO 96/32458 describe exemplary Fc variants, as well as interaction with the salvage receptor, and are hereby incorporated by reference. Furthermore, a native Fc comprises sites that may be removed because they provide structural features or biological activity that are not required for the fusion molecules of the present invention. Thus, in various embodiments, the term “Fc variant” comprises a molecule or sequence that lacks one or more native Fc sites or residues that affect or are involved in (1) disulfide bond formation, (2) incompatibility with a selected host cell (3) N-terminal heterogeneity upon expression in a selected host cell, (4) glycosylation, (5) interaction with complement, (6) binding to an Fc receptor other than a salvage receptor, or (7) antibody-dependent cellular cytotoxicity (ADCC).

[0019] The term “Fc domain” encompasses native Fc and Fc variant molecules and sequences as defined above. As with Fc variants and native Fc's, the term “Fc domain” includes molecules in monomeric or multimeric form, whether digested from whole antibody or produced by recombinant gene expression or by other means. In various embodiments, an “Fc domain” refers to a dimer of two Fc domain monomers (SEQ ID NO: 44) that generally includes full or part of the hinge region. In various embodiments, an Fc domain may be mutated to lack effector functions. In various embodiments, each of the Fc domain monomers in an Fc domain includes amino acid substitutions in the CH2 antibody constant domain to reduce the interaction or binding between the Fc domain and an Fcγ receptor. In various embodiments, each subunit of the Fc domain comprises two amino acid substitutions that reduce binding to an activating Fc receptor and/or effector function wherein said amino acid substitutions are L234A and L235A. In various embodiments, each subunit of the Fc domain comprises three amino acid substitutions that reduce binding to an activating Fc receptor and/or effector function wherein said amino acid substitutions are L234A, L235A and G237A (SEQ ID NO: 45).

[0020] In various embodiments, each of the two Fc domain monomers in an Fc domain includes amino acid substitutions that promote the heterodimerization of the two monomers. In various other embodiments, heterodimerization of Fc domain monomers can be promoted by introducing different, but compatible, substitutions in the two Fc domain monomers, such as “knob-into-hole” residue pairs. The “knob-into-hole” technique is also disclosed in U.S. Pat. No. 8,216,805. In yet another embodiment, one Fc domain monomer includes the knob mutation T366W and the other Fc domain monomer includes hole mutations T366S, L358A, and Y407V. In various embodiments, two Cys residues were introduced (S354C one chain and Y349C on the matching chain) that form a stabilizing disulfide bridge (SEQ ID NOS: 46 and 47). The use of heterodimeric Fc may result in monovalent IL-2 variant construct.

[0021] In various embodiments, the IL-2 variant Fc-fusion protein will be monomeric, i.e., contain only a single IL-2 mutein molecule. In such embodiments, the fusion protein is co-expressed with a heterodimeric Fc (e.g. a Hole-Fc having the sequence set forth in SEQ ID NO: 47) linked to an IL-2 variant and the matching heterodimeric Fc (e.g. a Knob Fc having the sequence set forth in SEQ ID NO: 46) or vice versa. When the heterodimer of the two Fc-containing polypeptides forms, the resulting protein comprises only a single IL-2 variant.

[0022] In various embodiments, an Fc domain may be mutated to further extend the in vivo half-lives. In various embodiments, each subunit of the Fc domain comprises three amino acid substitutions that enhance binding to human FcRn wherein said amino acid substitutions are M252Y, S254T, and T256E, disclosed in U.S. Pat. No. 7,658,921 (SEQ ID NO: 251). In various embodiments, each subunit of the Fc domain comprises one amino acid substitution that enhanced binding to human FcRn wherein said amino acid substitution is N434A, disclosed in U.S. Pat. No. 7,371,826 (SEQ ID NO: 252). In various embodiments, each subunit of the Fc domain comprises one amino acid substitution that enhanced binding to human FcRn wherein said amino acid substitutions are M428L and N434S, disclosed in U.S. Pat. No. 8,546,543. In various embodiments, the IL-2 variants are used to prepare the Fc-IL-2 fusion proteins set forth in SEQ ID NOS: 71-112, 152-194, 213-219, and 235-249.

[0023] In various embodiments, the IL-2 variants of the present invention can be attached to an antibody that confers extended half-life on the fusion molecule, such as anti-keyhole limpet hemocyanin (KLH) antibody. Such an antibody recognizes a foreign antigen, confers longer half-life but have no biological function or harm in human. The IgG class could be IgG, IgA, IgE or subclass (e.g., IgG1, IgG2, IgG3, IgA1, IgA2).

[0024] In various embodiments, the IL-2 variants of the present invention can be attached to targeting/dual functional moiety that is an antibody, an antibody fragment, a protein or a peptide targeting a molecule enriched in the target tissue, or exhibit binding to a diseased cell or disease microenvironment, such as inflammatory tissue target, TNF, TNF receptor, IL-6, IL-6 receptor, integrin α₄β₇, β₇, MAdCAM-1, BLYS, TSLP, APRIL, or an autoimmune or inflammation modulator (Table 1).

[0025] In various embodiments, the IL-2 variants are used to prepare the bi-functional fusion constructs set forth in SEQ ID NOS: 200-207, 253-274, and 307-312.

[0026] Any of the foregoing proteins highly expressed on various inflammatory tissues or immune cells can be used as autoimmune/inflammatory disease targets for the IL-2 variants of this invention. In various embodiments, the one or more autoimmune/inflammatory disease target, its variant or its mutant/isoform contemplated for use in the IL-2 variant constructs and methods of the present disclosure is selected from, or derived from, the list provided in Table 1.

TABLE 1
Targets or modulators for Autoimmune and Inflammatory Disorders

| | |
|---|---|
| IL-1 alpha | NP_000566 |
| IL-1 beta | NP_000567 |
| IL-2 | NP_000577 |
| IL-4 | NP_000580 |
| IL-4 induced 1 | NP_690863 |
| IL-5 | NP_000870 |
| IL-6 | NP_000591 |
| IL-6 receptor alpha (IL-6Ra) | NP_000556 |
| IL-7 | NP_000871 |
| IL-10 | NP_000563 |
| IL-12 (alpha and beta) | NP_000873 and NP_002178 |
| IL-13 | NP_002179 |
| IL-17 | NP_002181 |
| IL-21 | NP_068575 |
| IL-22 | NP_065386 |
| IL-23 | NP_057668 |
| IL-33 | NP_254274 |
| TNF family (TNF-alpha) | NP_000585 |
| TNFR (TNFRSF1A) | NP_001056 |
| GMCSF | NP_000749 |
| IFN | NP_008831 |
| IFN alpha-beta receptor 1 | NP_000620 |
| APRIL | NP_003799 |
| Integrins (Integrin α4β7) | NP_000880 |
| B Cell-Activating Factor (BAFF) | NP_006564 |
| BCR | NP_004318 |
| B Lymphocyte Stimulator (BLyS) | NP_006564 |
| B7RP1 | NP_056074 |
| B7H1 | NP_054862 |
| B7H2 | NP_056074 |
| CXCR3 | NP_001495 |
| MCP1 | NP_002973 |
| BCMA | NP_001183 |
| TACI | NP_036584 |
| CD20 | NP_068769 |
| CD22 | NP_001762 |
| CD80 | NP_005182 |
| CD40 | NP_001241 |
| CD40L | NP_000065 |
| TSLP | NP_149024 |
| ICOS | NP_036224 |
| TLRs (TLR2 and TLR4) | NP_003255 and NP_003257 |
| HMGB-1 | NP_002119 |
| HLA-DR | NP_001020330 |
| Collagen Type I | NP_000079 |
| Collagen Type II | NP_000080 |
| Fibronectin | XP_005246463 |
| Tenascin | NP_002151 |
| 1D10 | NP_114143 |
| MadCAM-1 | NP_570116 |
| LAP-TGFβ | NP_000651 |

[0027] In various embodiments, the IL-2 variant constructs of the present invention comprise a targeting moiety in the form of an antibody, an antibody fragment, a diabody, a protein or a peptide binding to a molecule enriched in the cancer tissue, such as a tumor associated antigen (TAA).

[0028] The TAA can be any molecule, macromolecule, combination of molecules, etc. against which an immune response is desired. The TAA can be a protein that comprises more than one polypeptide subunit. For example, the protein can be a dimer, trimer, or higher order multimer. In various embodiments, two or more subunits of the protein can be connected with a covalent bond, such as, for example, a disulfide bond. In various embodiments, the subunits of the protein can be held together with non-covalent interactions. Thus, the TAA can be any peptide, polypeptide, protein, nucleic acid, lipid, carbohydrate, or small organic molecule, or any combination thereof, against which the skilled artisan wishes to induce an immune response. In various embodiments, the TAA is a peptide that comprises about 5, about 6, about 7, about 8, about 9, about 10, about 11, about 12, about 13, about 14, about 15, about 16, about 17, about 18, about 19, about 20, about 25, about 30, about 35, about 40, about 45, about 50, about 55, about 60, about 65, about 70, about 75, about 80, about 85, about 90, about 95, about 100, about 150, about 200, about 250, about 300, about 400, about 500, about 600, about 700, about 800, about 900 or about 1000 amino acids. In various embodiments, the peptide, polypeptide, or protein is a molecule that is commonly administered to subjects by injection. In various embodiments, after administration, the tumor-specific antibody or binding protein serves as a targeting moiety to guide the IL-2 variant to the diseased site, such as a cancer site, where the active domain can be released and interact with its cognate receptors on diseased cells.

[0029] Any of the foregoing markers can be used as TAAs targets for the IL-2 variants of this invention. In various embodiments, the one or more TAA, TAA variant, or TAA mutant contemplated for use in the IL-2 variant constructs and methods of the present disclosure is selected from, or derived from, the list provided in Table 2.

TABLE 2

| Tumor Associated | |
|---|---|
| Antigen | RefSeq (protein) |
| Her2/neu | NP_001005862 |
| Her3 | NP_001005915 |
| Her4 | NP_001036064 |
| EGF | NP_001171601 |
| EGFR | NP_005219 |
| CD2 | NP_001758 |
| CD3 | NM_000732 |
| CD5 | NP_055022 |
| CD7 | NP_006128 |
| CD13 | NP_001141 |
| CD19 | NP_001171569 |
| CD20 | NP_068769 |
| CD21 | NP_001006659 |
| CD22 | NP_001762 |
| CD23 | NP_001193948 |
| CD30 | NP_001234 |
| CD33 | NP_001234.3 |
| CD34 | NP_001020280 |
| CD38 | NP_001766 |
| CD40 | NP_001241 |
| CD46 | NP_002380 |
| CD55 | NP_000565 |
| CD59 | NP_000602 |
| CD69 | NP_001772 |
| CD70 | NM_001252 |
| CD71 | NP_001121620 |
| CD80 | NP_005182 |
| CD97 | NP_001020331 |
| CD117 | NP_000213 |
| CD127 | NP_002176 |
| CD134 | NP_003318 |
| CD137 | NP_001552 |
| CD138 | NP_001006947 |
| CD146 | NP_006491 |
| CD147 | NP_001719 |
| CD152 | NP_001032720 |
| CD154 | NP_000065 |
| CD195 | NP_000570 |
| CD200 | NP_001004196 |
| CD212 | NP_001276952 |
| CD223 | NP_002277 |
| CD253 | NP_001177871 |
| CD272 | NP_001078826 |
| CD274 | NP_001254635 |
| CD276 | NP_001019907 |
| CD278 | NP_036224 |
| CD279 | NP_005009 |
| CD309 (VEGFR2) | NP_002244 |
| DR6 | NP_055267 |
| PD-L1 | NP_001254635 |
| Kv1.3 | NP_002223 |
| 5E10 | NP_006279 |
| MUC1 | NP_001018016 |
| uPA | NM_002658 |
| SLAMF7 (CD319) | NP_001269517 |
| MAGE 3 | NP_005353 |
| MUC 16 (CA-125) | NP_078966 |
| KLK3 | NP_001025218 |
| K-ras | NP_004976 |
| Mesothelin | NP_001170826 |
| p53 | NP_000537 |
| Survivin | NP_001012270 |
| G250 (Renal Cell | GenBank CAB82444.1 |
| Carcinoma Antigen) | |
| PSMA | NP_001014986 |
| HLA-DR | NP_001020330 |
| 1D10 | NP_114143 |
| Collagen Type I | NP_000079 |
| Collagen Type II | NP_000080 |
| Fibronectin | XP_005246463 |
| Tenascin | NP_002151 |
| Fibroblast Activation | NM_004460.3 |
| Protein (FAP) | |
| Matrix Metalloproteinase-14 | NP_004986 |
| (MMP-14) | |
| Legumain | NP_001008530 |
| Matrix Metalloproteinase-2 | NP_001121363 |
| (MMP-2) | |
| Matrix Metalloproteinase-9 | NP_004985 |
| (MMP-9) | |
| Siglec 8 | NP_055257 |
| Siglec 9 | NP_001185487 |
| Siglec 15 | NP_998767 |

[0030] In various embodiments, the IL-2 variants of the present invention can be attached to targeting/dual functional moiety that is an antibody, an antibody fragment, a diabody, a protein or a peptide targeting immune checkpoint modulators.

[0031] A number of immune-checkpoint protein antigens have been reported to be expressed on various immune cells, including, e.g., SIRP (expressed on macrophage, monocytes, dendritic cells), CD47 (highly expressed on tumor cells and other cell types), VISTA (expressed on monocytes, dendritic cells, B cells, T cells), CD152 (expressed by activated CD8+ T cells, CD4+ T cells and regulatory T cells), CD279 (expressed on tumor infiltrating lymphocytes, expressed by activated T cells (both CD4 and CD8), regulatory T cells, activated B cells, activated NK cells, anergic T cells, monocytes, dendritic cells), CD274 (expressed on T cells, B cells, dendritic cells, macrophages, vascular endothelial cells, pancreatic islet cells), and CD223 (expressed by activated T cells, regulatory T cells, anergic T cells, NK cells, NKT cells, and plasmacytoid dendritic cells)(see, e.g., Pardoll, D., Nature Reviews Cancer, 12:252-264, 2012). Antibodies that bind to an antigen which is determined to be an immune-checkpoint protein are known to those skilled in the art. For example, various anti-CD276 antibodies have been described in the art (see, e.g., U.S. Pat. Public. No. 20120294796 (Johnson et al) and references cited therein); various anti-CD272 antibodies have been described in the art (see, e.g., U.S. Pat. Public. No. 20140017255 (Mataraza et al) and references cited therein); various anti-CD152/CTLA-4 antibodies have been described in the art (see, e.g., U.S. Pat. Public. No. 20130136749 (Korman et al) and references cited therein); various anti-LAG-3/CD223 antibodies have been described in the art (see, e.g., U.S. Pat. Public. No. 20110150892 (Thudium et al) and references cited therein); various anti-CD279/PD-1 antibodies have been described in the art (see, e.g., U.S. Pat. No. 7,488,802 (Collins et al) and references cited therein); various anti-PD-L1 antibodies have been described in the art (see, e.g., U.S. Pat. Public. No. 20130122014 (Korman et al) and references cited therein); various anti-TIM-3 antibodies have been described in the art (see, e.g., U.S. Pat. Public. No. 20140044728 (Takayanagi et al) and references cited therein); and various anti-B7-H4 antibodies have been described in the art (see, e.g., U.S. Pat. Public. No. 20110085970 (Terrett et al) and references cited therein). Each of these references is hereby incorporated by reference in its entirety for the specific antibodies and sequences taught therein.

[0032] In various embodiments, IL-2 fusion partner can be an antibody, antibody fragment, a diabody, or protein or peptide that exhibit binding to an immune-checkpoint protein antigen that is present on the surface of an immune cell. In various embodiments, the immune-checkpoint protein antigen is selected from the group consisting of, but not limited to, CD279 (PD-1), CD274 (PDL-1), CD276, CD272, CD152, CD223 (LAG-3), CD40, SIRPα, CD47, OX-40, GITR, ICOS, CD27, 4-1 BB, TIM-3, B7-H3, B7-H4, TIGIT, and VISTA.

[0033] In various embodiments, the heterologous protein is attached to the IL-2 variant by a linker and/or a hinge linker peptide. The linker or hinge linker may be an artificial sequence of between 5, 10, 15, 20, 30, 40 or more amino acids that are relatively free of secondary structure.

[0034] In various embodiments, the heterologous protein is attached to the IL-2 variant by a rigid linker peptide of between 10, 15, 20, 30, 40 or more amino acids that display α-helical conformation and may act as rigid spacers between protein domains.

[0035] In another aspect, IL-2 variant can be linked to various nonproteinaceous polymers, including, but not limited to, various polyols such as polyethylene glycol, polypropylene glycol or polyoxyalkylenes, in the manner set forth in U.S. Pat. Nos. 4,640,835; 4,496,689; 4,301,144; 4,670,417; 4,791,192 or 4,179,337. In various embodiments, amino acid substitutions may be made in various positions within the IL-2 variants to facilitate the addition of polymers such as PEG. In various embodiments, such PEGylated proteins may have increase increased half-life and/or reduced immunogenicity over the non-PEGylated proteins.

[0036] By “polyethylene glycol” or “PEG” is meant a polyalkylene glycol compound or a derivative thereof, with or without coupling agents or derivatization with coupling or activating moieties (e.g., with aldehyde, hydroxysuccinimidyl, hydrazide, thiol, triflate, tresylate, azirdine, oxirane, orthopyridyl disulphide, vinylsulfone, iodoacetamide or a maleimide moiety). In various embodiments, PEG includes substantially linear, straight chain PEG, branched PEG, or dendritic PEG. PEG is a well-known, water soluble polymer that is commercially available or can be prepared by ring-opening polymerization of ethylene glycol according to methods well known in the art (Sandler and Karo, Polymer Synthesis, Academic Press, New York, Vol. 3, pages 138-161).

[0037] In various embodiments, IL-2 variants can be linked non-covalently or covalently to an IgG Fc or other polypeptides that bind to the neonatal Fey/receptor, human serum albumin, or polypeptides that bind to a protein having extended serum half-life, or various nonproteinaceous polymers at either the N-terminus or C-terminus.

[0038] In another aspect, the present disclosure provides a pharmaceutical composition comprising the isolated IL-2 variants in admixure with a pharmaceutically acceptable carrier.

[0039] In another aspect, the present disclosure provides a method for treating an autoimmune disease in a subject, comprising administering a therapeutically effective amount of the pharmaceutical compositions of the invention to a subject in need thereof. In one embodiment, the subject is a human subject. An autoimmune disease, as pertains to the present invention, is a disease or disorder arising from and directed against an individual's own tissues or a co-segregate or manifestation thereof or resulting condition therefrom. In various embodiments, the autoimmune disease includes, but is not limited to, arthritis (including rheumatoid arthritis, reactive arthritis), systemic lupus erythematosus (SLE), Graft versus Host Disease (GvHD), psoriasis and inflammatory bowel disease (IBD), encephalomyelitis, uveitis, myasthenia gravis, multiple sclerosis, insulin dependent diabetes, Addison's disease, celiac disease, chronic fatigue syndrome, autoimmune hepatitis, autoimmune alopecia, ankylosing spondylitis, ulcerative colitis, Crohn's disease, fibromyalgia, pemphigus vulgaris, Sjogren's syndrome, Kawasaki's Disease, hyperthyroidism/Graves disease, hypothyroidism/Hashimoto's disease, endometriosis, scleroderma, pernicious anemia, Goodpasture syndrome, Guillain-Barre syndrome, Wegener's disease, glomerulonephritis, aplastic anemia (including multiply transfused aplastic anemia patients), paroxysmal nocturnal hemoglobinuria, myelodysplastic syndrome, idiopathic thrombocytopenic purpura, autoimmune hemolytic anemia, Evan's syndrome, Factor VIII inhibitor syndrome, systemic vasculitis, dermatomyositis, polymyositis and rheumatic fever, autoimmune lymphoproliferative syndrome (ALPS), autoimmune bullous pemphigoid, Parkinson's disease, sarcoidosis, vitiligo, primary biliary cirrhosis, and autoimmune myocarditis.

[0040] In another aspect, the present disclosure provides a method for treating an autoimmune disease in a subject, comprising administering a therapeutically effective amount of the pharmaceutical compositions of the invention in combination with a second therapeutic agent capable of treating an autoimmune disease.

[0041] In another aspect, the present disclosure provides a method for treating an inflammatory disease in a subject, comprising administering a therapeutically effective amount of the pharmaceutical compositions of the invention to a subject in need thereof. In one embodiment, the subject is a human subject. In various embodiments, the inflammatory disease to be treated includes, but is not limited to, Crohn's disease, colitis, dermatitis, psoriasis, diverticulitis, hepatitis, irritable bowel syndrome (IBS), lupus erythematous, nephritis, Parkinson's disease, ulcerative colitis, collagenous colitis, lymphocytic colitis, ischemic colitis, diversion colitis, Behcet's syndrome and indeterminate colitis multiple sclerosis (MS), Alzheimer's disease, arthritis, rheumatoid arthritis, asthma, and various cardiovascular diseases such as atherosclerosis and vasculitis. In various embodiments, the inflammatory disease is selected from the group consisting of rheumatoid arthritis, diabetes, gout, cryopyrin-associated periodic syndrome, and chronic obstructive pulmonary disorder.

[0042] In another aspect, the present disclosure provides a method for treating an inflammatory disease in a subject, comprising administering a therapeutically effective amount of the pharmaceutical compositions of the invention in combination with a second therapeutic agent capable of treating an inflammatory disease.

[0043] In another aspect, the present disclosure provides methods for organ transplantation or associated graft-versus-host disease in a subject, comprising administering a therapeutically effective amount of the pharmaceutical compositions of the invention to a subject in need thereof. In one embodiment, the subject is a human subject. In various embodiments, the transplantation is selected from organ transplantations of the heart, kidneys, liver, lungs, pancreas, intestine and thymus or from tissues transplantations of the bones, tendons, cornea, skin, heart valves, nerves and veins.

[0044] In another aspect, the present disclosure provides a method for treating cancer or cancer metastasis in a subject, comprising administering a therapeutically effective amount of the pharmaceutical compositions of the invention to a subject in need thereof. In one embodiment, the subject is a human subject. In various embodiments, the cancer is selected from pancreatic cancer, gastric cancer, liver cancer, breast cancer, ovarian cancer, colorectal cancer, melanoma, leukemia, myelodysplastic syndrome, lung cancer, prostate cancer, brain cancer, bladder cancer, head-neck cancer, or rhabdomyosarcoma.

[0045] In another aspect, the present disclosure provides a method for treating cancer or cancer metastasis in a subject, comprising administering a therapeutically effective amount of the pharmaceutical compositions of the invention in combination with a second therapy selected from the group consisting of: cytotoxic chemotherapy, immunotherapy, small molecule kinase inhibitor targeted therapy, surgery, radiation therapy, and stem cell transplantation. In various embodiments, the combination therapy may comprise administering to the subject a therapeutically effective amount of immunotherapy, including, but are not limited to, treatment using depleting antibodies to specific tumor antigens; treatment using antibody-drug conjugates; treatment using agonistic, antagonistic, or blocking antibodies to co-stimulatory or co-inhibitory molecules (immune checkpoints) such as CTLA-4, PD-1, PD-L1, OX-40, CD137, GITR, LAGS, TIM-3, CD40, CD47, SIRPα, ICOS, Siglec 8, Siglec 9, Siglec 15, TIGIT and VISTA; treatment using bispecific T cell engaging antibodies (BiTE®) such as blinatumomab: treatment involving administration of biological response modifiers such as TNF family, IL-1, IL-4, IL-7, IL-12, IL-15, IL-17, IL-21, IL-22, GM-CSF, IFN-α, IFN-β and IFN-γ; treatment using therapeutic vaccines such as sipuleucel-T; treatment using dendritic cell vaccines, or tumor antigen peptide vaccines; treatment using chimeric antigen receptor (CAR)-T cells; treatment using CAR-NK cells; treatment using tumor infiltrating lymphocytes (TILs); treatment using adoptively transferred anti-tumor T cells (ex vivo expanded and/or TCR transgenic); treatment using TALL-104 cells; and treatment using immunostimulatory agents such as Toll-like receptor (TLR: TLR7, TLR8, and TLR 9) agonists CpG and imiquimod; wherein the combination therapy provides increased effector cell killing of tumor cells, i.e., a synergy exists between the IL-2 variants and the immunotherapy when co-administered.

[0046] In another aspect, the disclosure provides uses of the IL-2 variants for the preparation of a medicament for the treatment of an autoimmune disease.

[0047] In another aspect, the disclosure provides uses of the IL-2 variants for the preparation of a medicament for the treatment of organ transplantation and GVHD.

[0048] In another aspect, the disclosure provides uses of the IL-2 variants for the preparation of a medicament for the treatment of inflammatory disorders.

[0049] In another aspect, the disclosure provides uses of the IL-2 variants for the preparation of a medicament for the treatment of cancer.

[0050] In another aspect, the present disclosure provides isolated nucleic acid molecules comprising a polynucleotide encoding an IL-2 variant of the present disclosure. In another aspect, the present disclosure provides vectors comprising the nucleic acids described herein. In various embodiments, the vector is an expression vector. In another aspect, the present disclosure provides isolated cells comprising the nucleic acids of the disclosure. In various embodiments, the cell is a host cell comprising the expression vector of the disclosure. In another aspect, methods of making the IL-2 variants are provided by culturing the host cells under conditions promoting expression of the proteins or polypeptides.

### BRIEF DESCRIPTION OF THE FIGURES

[0051] FIG. 1 depicts size exclusion chromatogram of exemplary IL-2 Fc fusion proteins A) P-0250, B) P-0318, C) P-0317, D) P-0447, and E) P-0511 after protein A purification. FIG. 1D and FIG. 1E also illustrate the SDS-PAGE of respective samples in the absence (Lane 2) and presence of reducing agent (Lane 3).

[0052] FIG. 2 depicts differential effects of Fc fusion proteins of IL-2 variants with amino acid substitutions of aspartic acid at position 20 (D20X) on induction of STAT5 phosphorylation in CD4+ Treg (A) vs Tconv (B) cells in comparison with the wild type fusion protein (P-0250) in human PBMC assay.

[0053] FIG. 3 depicts differential effects of Fc fusion proteins of IL-2 variants P-0375 (N88Q) on induction of STAT5 phosphorylation in CD4+ Treg (A) vs Tconv (B) cells in comparison with the wild type (P-0250) and the benchmark proteins in human PBMC assay.

[0054] FIG. 4 depicts differential effects on STAT5 phosphorylation by Fc fusion proteins of IL-2 variants with amino acid substitutions at position 19 in comparison with the wild type (P-0250). The ability to induce STAT5 phosphorylation in CD4+ Treg (A and C) and Tconv (B and D) cells was determined in human PBMC assay by FACS analysis.

[0055] FIG. 5 depicts differential effects on STAT5 phosphorylation by Fc fusion proteins of IL-2 variants with individual amino acid substitution at either position 19 (P-0372) or position 126 (P-0303), or combination mutant (P-0419) in comparison with the wild type (P-0250) or the Benchmark protein. The ability to induce STAT5 phosphorylation in CD4+ Treg (A, C, and E) and CD4+ Tconv (B, D &F) cells was determined by FACS analysis.

[0056] FIG. 6 depicts differential effects on STAT5 phosphorylation by Fc fusion proteins of IL-2 variants harboring different combination of dual amino acid substitutions (P-0419, P-0464, P-0471, P-0474, P-0417 and P-0322) in comparison with the wild type (P-0250). The biological activity of P-0417 and P-0322 was also compared to their counterparts with single amino acid substitution, P-0373 and P-0363, respectively. The ability to induce STAT5 phosphorylation in CD4+ Treg (A & C) and CD4+ Tconv (B & D) cells was determined in human PBMC assay by FACS analysis. FIGS. 6E and 6F depicts differential effects on STAT5 phosphorylation in CD4+ Treg cells by additional IL-2 variant Fc fusion proteins, P-0860 and P-0859.

[0057] FIG. 7 depicts differential effects on STAT5 phosphorylation by Fc fusion proteins of IL-2 variants with individual amino acid substitution at either position 19 (P-0424) or position 126 (P-0303), or combination mutant (P-0447) in comparison with the wild type (P-0250), and differential effects on STAT5 phosphorylation by Fc fusion proteins of IL-2 variants harboring different combinational amino acid substitutions (P-0419, P-0447, P-0448, and P-0449) in comparison with the wild type (P-0250) and benchmark Fc fusion proteins. The ability to induce STAT5 phosphorylation in CD4+ Treg (A and C) and CD4+ Tconv (B and D) cells was determined in human PBMC assay by FACS analysis.

[0058] FIG. 8 depicts pSTAT5 stimulation activity of IL-2 fusion proteins P-0250, P-0424, and P-447 in comparison to their respective counterparts harboring S125I substitution, P-0531, P-0491, and P-0511. The ability to induce STAT5 phosphorylation in CD4+ Treg (A, C and E) and CD4+ Tconv (B, D and F) cells was determined in human PBMC assay by FACS analysis.

[0059] FIG. 9 depicts differential effects on STAT5 phosphorylation by IL-2 variant Fc fusions (P-0511 and P-0512) in comparison with the wild type (P-0250) and three benchmark molecules in three subsets of CD4+ T cells; A) CD4+FoxP3+CD25+ Treg cells, B) CD4+FoxP3-CD25+ activated Tconv cells, and C) CD4+FoxP3-CD25− naïve Tconv cells. The ability to induce STAT5 phosphorylation was determined in human PBMC assay by FACS analysis.

[0060] FIG. 10 depicts differential effects on stimulating proliferation of A) CD8+ T cells and B) NK cells by P-0511 and P-0512 in comparison with the wild type (P-0250) and Benchmark molecules. Cell proliferation was determined in human PBMC assay by FACS analysis of CFSE dilution and expressed as a percent of divided cells.

[0061] FIG. 11 depicts differential effects on inducing STAT5 phosphorylation by IL-2 variant Fc fusion P-0511 in comparison to the wild-type equivalent P-0531 in different cells types. The ability to induce STAT5 phosphorylation in A) CD4+ Treg, B) CD4+ Tconv, C) CD8+ T cells, and D) CD56+NK cells was determined in human PBMC assay by FACS analysis. FIG. 11E depicts binding strength of P-511 to IL-2Rβ and γc complex in comparison to P-0531 and Benchmark-1 in ELISA assay.

[0062] FIG. 12 depicts the proliferation and expansion of Treg cells in mice treated with Fc fusion proteins of IL-2 variants and the benchmarks after a single subcutaneous injection. Blood was collected at the indicated time points for measurement of proliferation and lymphocytes phenotyping. (A) Percentage of the proliferation marker Ki67 positive Treg cells; (B) Percentage of Treg cells in total CD4+ T cell population; (C) Percentage of Treg cells in total blood lymphocytes. Data are expressed as mean±SEM. Statistical analysis was performed by one-way anova followed by Tukey's post hoc test. **** p<0.0001; *** p<0.001 compared to PBS group at respective time point.

[0063] FIG. 13 depicts the proliferation of effector T cells and NK cells in mice treated with IL-2 mutant Fc fusion proteins and the benchmarks after a single subcutaneous injection. Blood was collected at the indicated time points for measurement of lymphocyte proliferation. (A) Percentage of Ki67 positive CD4+T conventional (Tconv) cells; (B) Percentage of Ki67 positive CD8+ T cells; (C) Percentage of Ki67 positive NK cells. Data are expressed as mean±SEM. Statistical analysis was performed by one-way anova followed by Tukey's post hoc test. **** p<0.0001; *** p<0.001 compared to PBS group at respective time point.

[0064] FIG. 14. depicts the expansion of effector T cells and NK cells in mice treated with IL-2 mutant Fc fusion proteins and the benchmarks after a single subcutaneous injection. (A-B) Percentage of CD4+T conventional (Tconv) cells in total CD4+ T cells (A) and total blood lymphocytes (B). (C) Percentage of CD8+ T cells in total blood lymphocytes; (D) Percentage of NK cells in total blood lymphocytes. Data are expressed as mean±SEM.

[0065] FIG. 15 depicts the ratio of Treg to Tconv cells based on A) percentage of Ki67 positive expression, and B) cell numbers in mice treated with IL-2 mutant Fc fusion proteins, and the benchmarks. Data were acquired with FACS and are expressed as mean±SEM. Statistical analysis was performed by one-way anova followed by Tukey's post hoc test. **** p<0.0001; * p<0.05 compared to PBS group at respective time point.

[0066] FIG. 16 depicts the expression of CD25 and Foxp3 on Treg cells in mice treated with IL-2 mutant Fc fusion proteins and the benchmarks after a single subcutaneous injection. The expression level of A) Foxp3, and B) CD25 was analyzed by FACS analysis and expressed as mean fluorescent intensity (MFI). Data are expressed as mean±SEM. **** p<0.0001, compared to PBS group at respective time point.

[0067] FIG. 17 depicts dose-dependent increase in the proliferation and expansion of Treg cells in mice following a single injection of IL-2 variant Fc fusion protein P-0511. Blood was collected at the indicated time points for lymphocyte phenotyping and measurement of Ki67 proliferation marker. A) Percentage of the proliferation marker Ki67 positive Treg cells; B) Percentage of Treg cells in total CD4+ T cells; C) number of Treg cells per microliter of whole blood. (D) Fold change of Treg cell numbers from the baseline for each group. Data were expressed as mean±SEM. Statistical analysis was performed by one-way anova followed by Tukey's post hoc test. **** p<0.0001, *** p<0.001, ** p<0.01, * p<0.05 compared to PBS group at respective time point.

[0068] FIG. 18 depicts dose-dependent effect of IL-2 variant Fc fusion protein P-0511 on the percentage of Treg cells (A), CD4+ Tconv cells (B), CD8 T cells (C) and NK cells (D) over total lymphocytes in mice following a single injection. Blood was collected at the indicated time points for lymphocyte phenotyping. Data were determined by FACS analysis and are expressed as mean±SEM. Statistical analysis was performed by one-way anova followed by Tukey's post hoc test. **** p<0.0001, ** p<0.01, * p<0.05 compared to PBS group at respective time point.

[0069] FIG. 19 depicts dose-dependent increases in A) ratio of Treg to T cony cell numbers, B) expression of CD25 on Treg cells, and C) expression of Foxp3 on Treg cells in mice following a single injection of P-0511. Data were determined by FACS analysis and are expressed as mean±SEM. Statistical analysis was performed by one-way anova followed by Tukey's post hoc test. **** p<0.0001, *** p<0.001, ** p<0.01 compared to PBS group at respective time point.

[0070] FIG. 20 depicts the sustained proliferation and expansion of Treg cells in mice receiving repeated dosings of Fc fusion proteins of IL-2 variants (P-0511 and P-0512), but not the wild type (P-0531) and the benchmark. Compounds were given s.c. once every three days (Q3D) and blood was collected 3 days post the 1st and the 3rd injection for lymphocyte phenotyping and measurement of proliferation marker Ki67. A) Percentage of Ki67 positive Treg cells; B) Percentage of Treg cells in total CD4+ T cells; C) Percentage of Treg cells in total blood lymphocytes. Data were determined by FACS analysis and are expressed as mean±SEM. Statistical analysis was performed by one-way anova followed by Tukey's post hoc test. **** p<0.0001, * p<0.05 compared to respective PBS group.

[0071] FIG. 21 depicts the sustained elevation of Treg cell counts in mice receiving repeated dosing of Fc fusion proteins of IL-2 variants (P-0511 and P-0512), but not the wild type (P-0531) and the benchmark. Compounds were given s.c. once every three days (Q3D) and blood was collected 3 days post the 1^{st} and the 3^{rd} injection for lymphocyte phenotyping and measurement of proliferation marker Ki67. A) Number of Treg cells per microliter of whole blood; B) fold change of the Treg numbers compared to the PBS control group; Data were determined by FACS analysis and are expressed as mean±SEM. Statistical analysis was performed by one-way anova followed by Tukey's post hoc test. **** p<0.0001, *** p<0.001, p<0.01, compared to respective PBS group.

[0072] FIG. 22 depicts the retaining of the elevated ratio of Treg to Tconv in mice receiving repeated dosing of Fc fusion proteins of IL-2 variants (P-0511 and P-0512), but not the wild type (P-0531) and the benchmark. Compounds were given s.c. once every three days (Q3D) and blood was collected 3 days post the 1^{st} and the 3^{rd} injection for Treg and Tconv cell phenotyping. The ratio was calculated based on the % Treg and % Tconv in total CD4 cells. Data were determined by FACS analysis and are expressed as mean±SEM. Statistical analysis was performed by one-way anova followed by Tukey's post hoc test. **** p<0.0001, compared to respective PBS group.

[0073] FIG. 23 depicts the suppression of antigen-driven inflammation by P-0511 in a mouse model of delayed-type hypersensitivity (DTH) induced by keyhole limpet hemocyanin (KLH) antigen. Mice were KLH immunized on day 0 and re-challenged in right ear on day 5. Mice were treated with P-0511 either Q3D or Q5D starting at Day −2. Kinetics of the DTH response using the change in ear thickness relative to baseline values (A ear thickness) at various times after KLH challenge was illustrated for A) Q3D, and B) Q5D dosing schedules. Data are expressed as mean±SEM. Statistical analysis was performed by one-way anova followed by Tukey's post hoc test. **** p<0.0001, *** p<0.001, ** p<0.01, * p<0.05, compared to respective PBS group at respective timepoint.

[0074] FIG. 24 depicts the suppression of antigen-driven inflammation by P-0511 in comparison with Benchmark-1 in a mouse model of DTH induced by KLH antigen. Mice were KLH immunized on day 0 and re-challenged in right ear on day 5. Mice were treated with the compound Q5D starting on day −2. Kinetics of the DTH response using the change in ear thickness relative to baseline values (A ear thickness) at various times after KLH challenge was illustrated. Data are expressed as mean±SEM. Statistical analysis was performed by one-way anova followed by Tukey's post hoc test. **** p<0.0001, ** p<0.01, * p<0.05, compared to respective PBS group at respective timepoint.

[0075] FIG. 25 depicts differential effects on stimulating Ki67 expression of A) CD4+ T cells, B) CD8+ T cells and C) NK cells by P-0573 in comparison with wild type (P-0531) and Benchmark-4. Dose-dependent increases in percentage of Ki67 expression was determined in human PBMC assay by FACS analysis.

[0076] FIG. 26 depicts differential effects on STAT5 phosphorylation by various IL-2 variant bifunctional constructs in comparison with the Treg-selective IL-2 variant Fc fusion protein P-0511 and/or corresponding antibody fusion protein P-0536. The dose-dependent induction of STAT5 phosphorylation on CD4+ Treg (A, C, and E) and CD4+ Tconv (B, D, and F) cells was determined in human PBMC assay by FACS analysis.

[0077] FIG. 27 depicts the proliferation and expansion of Treg cells in mice after a single subcutaneous injection of either IL-2 variants bifunctional constructs (P-0536, P-0546, P-0559, or P-0560) or the Treg-selective IL-2 variant Fc fusion protein P-0511. Blood was collected at the indicated time points for measurement of proliferation and lymphocytes phenotyping. (A) Percentage of the proliferation marker Ki67 positive Treg cells; (B) Percentage of Treg cells in total CD4+ T cell population; (C) Percentage of Treg cells in total blood lymphocytes. Data are expressed as mean±SEM.

[0078] FIG. 28 depicts the proliferation of effector T cells and NK cells in mice after a single subcutaneous injection of either IL-2 variants bifunctional constructs (P-0536, P-0546, P-0559, or P-0560) or the Treg-selective IL-2 variant Fc fusion protein P-0511. Blood was collected at the indicated time points for measurement of lymphocyte proliferation. (A) Percentage of Ki67 positive CD4+Foxp3− Tconv cells; (B) Percentage of Ki67 positive CD4+CD25+Foxp3− Teff cells; (C) Percentage of Ki67 positive CD8+ T cells; (D) Percentage of Ki67 positive NK cells. Data are expressed as mean±SEM.

[0079] FIG. 29 depicts the expansion of effector T cells and NK cells in mice after a single subcutaneous injection of either IL-2 variants bifunctional constructs (P-0536, P-0546, P-0559, or P-0560) or the Treg-selective IL-2 variant Fc fusion protein P-0511. (A) Percentage of CD4+Foxp3− Tconv cells in total blood lymphocytes; (B) Percentage of CD4+CD25+Foxp3− Teff cells in total blood lymphocytes; (C) Percentage of CD8+ T cells in total blood lymphocytes; (D) Percentage of Ki67 positive NK cells in total blood lymphocytes. Data are expressed as mean±SEM.

[0080] FIG. 30 depicts the ratio of Treg to Tconv cells based on A) percentage of Ki67 positive expression, and B) cell numbers in mice treated with either IL-2 variants bifunctional constructs (P-0536, P-0546, P-0559, or P-0560) or the Treg-selective IL-2 variant Fc fusion protein P-0511. Data were acquired with FACS and are expressed as mean±SEM.

[0081] FIG. 31 depicts the expression of CD25 and Foxp3 on Treg cells in mice treated with either IL-2 variants bifunctional constructs (P-0536, P-0546, P-0559, or P-0560) or the Treg-selective IL-2 variant Fc fusion protein P-0511. The expression level of A) Foxp3, and B) CD25 was analyzed by FACS analysis and expressed as mean fluorescent intensity (MFI). Data are expressed as mean±SEM.

### MODE(S) FOR CARRYING OUT THE DISCLOSURE

[0082] The present invention relates to polypeptides which share primary sequence with human IL-2, except for several amino acids that have been mutated. One panel of IL-2 variants comprise mutations that preferentially promotes the proliferation, survival, activation and/or function of immunosuppressive regulatory T cells (T CD4+CD25+FoxP3+) over effector T cells and NK cells. Also includes therapeutic uses of such IL-2 selective agonist, used alone, or in combination with disease tissue targeting protein or peptide, or as the building block in bifunctional molecule construct, to treat autoimmune and various inflammatory disorders. Another panel of IL-2 variants comprise mutations substantially reduce the ability of these polypeptides to stimulate Treg cells and make them more effective in the therapy of tumors. Also includes therapeutic uses of these mutated variants, used alone or in combination with vaccines, or TAA-targeting biologics, or immune checkpoint blocker, or as the building block in bifunctional molecule construct, for the therapy of diseases such as cancer or infections where the activity of regulatory T cells (Tregs) is undesirable. In another aspect the present invention relates to pharmaceutical compositions comprising the polypeptides disclosed. Finally, the present invention relates to the therapeutic use of the polypeptides and pharmaceutical compositions disclosed due to their selective modulating effect of the immune system on diseases like autoimmune and inflammatory disorders or cancer and various infectious diseases.

### Definitions

[0083] The terms “polypeptide”, “peptide” and “protein” are used interchangeably herein to refer to a polymer of amino acid residues. In various embodiments, “peptides”, “polypeptides”, and “proteins” are chains of amino acids whose alpha carbons are linked through peptide bonds. The terminal amino acid at one end of the chain (amino terminal) therefore has a free amino group, while the terminal amino acid at the other end of the chain (carboxy terminal) has a free carboxyl group. As used herein, the term “amino terminus” (abbreviated N-terminus) refers to the free α-amino group on an amino acid at the amino terminal of a peptide or to the α-amino group (imino group when participating in a peptide bond) of an amino acid at any other location within the peptide. Similarly, the term “carboxy terminus” refers to the free carboxyl group on the carboxy terminus of a peptide or the carboxyl group of an amino acid at any other location within the peptide. Peptides also include essentially any polyamino acid including, but not limited to, peptide mimetics such as amino acids joined by an ether as opposed to an amide bond

[0084] Polypeptides of the disclosure include polypeptides that have been modified in any way and for any reason, for example, to: (1) reduce susceptibility to proteolysis, (2) reduce susceptibility to oxidation, (3) alter binding affinity for forming protein complexes, (4) alter binding affinities, and (5) confer or modify other physicochemical or functional properties.

[0085] An amino acid “substitution” as used herein refers to the replacement in a polypeptide of one amino acid at a particular position in a parent polypeptide sequence with a different amino acid. Amino acid substitutions can be generated using genetic or chemical methods well known in the art. For example, single or multiple amino acid substitutions (e.g., conservative amino acid substitutions) may be made in the naturally occurring sequence (e.g., in the portion of the polypeptide outside the domain(s) forming intermolecular contacts). A “conservative amino acid substitution” refers to the substitution in a polypeptide of an amino acid with a functionally similar amino acid. The following six groups each contain amino acids that are conservative substitutions for one another:

[0086] 1) Alanine (A), Serine (S), and Threonine (T)

[0087] 2) Aspartic acid (D) and Glutamic acid (E)

[0088] 3) Asparagine (N) and Glutamine (Q)

[0089] 4) Arginine (R) and Lysine (K)

[0090] 5) Isoleucine (I), Leucine (L), Methionine (M), and Valine (V)

[0091] 6) Phenylalanine (F), Tyrosine (Y), and Tryptophan (W)

[0092] A “non-conservative amino acid substitution” refers to the substitution of a member of one of these classes for a member from another class. In making such changes, according to various embodiments, the hydropathic index of amino acids may be considered. Each amino acid has been assigned a hydropathic index on the basis of its hydrophobicity and charge characteristics. They are: isoleucine (+4.5); valine (+4.2); leucine (+3.8); phenylalanine (+2.8); cysteine/cystine (+2.5); methionine (+1.9); alanine (+1.8); glycine (−0.4); threonine (−0.7); serine (−0.8); tryptophan (−0.9); tyrosine (−1.3); proline (−1.6); histidine (−3.2); glutamate (−3.5); glutamine (−3.5); aspartate (−3.5); asparagine (−3.5); lysine (−3.9); and arginine (−4.5).

[0093] The importance of the hydropathic amino acid index in conferring interactive biological function on a protein is understood in the art (see, for example, Kyte et al., 1982, J. Mol. Biol. 157:105-131). It is known that certain amino acids may be substituted for other amino acids having a similar hydropathic index or score and still retain a similar biological activity. In making changes based upon the hydropathic index, in various embodiments, the substitution of amino acids whose hydropathic indices are within ±2 is included. In various embodiments, those that are within ±1 are included, and in various embodiments, those within ±0.5 are included.

[0094] It is also understood in the art that the substitution of like amino acids can be made effectively on the basis of hydrophilicity, particularly where the biologically functional protein or peptide thereby created is intended for use in immunological embodiments, as disclosed herein. In various embodiments, the greatest local average hydrophilicity of a protein, as governed by the hydrophilicity of its adjacent amino acids, correlates with its immunogenicity and antigenicity, i.e., with a biological property of the protein.

[0095] The following hydrophilicity values have been assigned to these amino acid residues: arginine (+3.0); lysine (+3.0); aspartate (+3.0.+−0.1); glutamate (+3.0.+−0.1); serine (+0.3); asparagine (+0.2); glutamine (+0.2); glycine (0); threonine (−0.4); proline (−0.5.+−0.1); alanine (−0.5); histidine (−0.5); cysteine (−1.0); methionine (−1.3); valine (−1.5); leucine (−1.8); isoleucine (−1.8); tyrosine (−2.3); phenylalanine (−2.5) and tryptophan (−3.4). In making changes based upon similar hydrophilicity values, in various embodiments, the substitution of amino acids whose hydrophilicity values are within +2 is included, in various embodiments, those that are within ±1 are included, and in various embodiments, those within ±0.5 are included.

[0096] Exemplary amino acid substitutions are set forth in Table 3.

TABLE 3

| Original Residues | Exemplary Substitutions | Preferred Substitutions |
|---|---|---|
| Ala | Val, Leu, Ile | Val |
| Arg | Lys, Gln, Asn | Lys |
| Asn | Gln | |
| Asp | Glu | |
| Cys | Ser, Ala | Ser |
| Gln | Asn | Asn |
| Glu | Asp | Asp |
| Gly | Pro, Ala | Ala |
| His | Asn, Gln, Lys, Arg | Arg |
| Ile | Leu, Val, Met, Ala, | Leu |
| | Phe, Norleucine | |
| Leu | Norleucine, Ile, | Ile |
| | Val, Met, Ala, Phe | |
| Lys | Arg, 1,4 Diamino-butyric | Arg |
| | Acid, Gln, Asn | |
| Met | Leu, Phe, Ile | Leu |
| Phe | Leu, Val, Ile, Ala, Tyr | Leu |
| Pro | Ala | Gly |
| Ser | Thr, Ala, Cys | Thr |
| Thr | Ser | |
| Trp | Tyr, Phe | Tyr |
| Tyr | Trp, Phe, Thr, Ser | Phe |
| Val | Ile, Met, Leu, Phe, | Leu |
| | Ala, Norleucine | |

[0097] A skilled artisan will be able to determine suitable variants of polypeptides as set forth herein using well-known techniques. In various embodiments, one skilled in the art may identify suitable areas of the molecule that may be changed without destroying activity by targeting regions not believed to be important for activity. In other embodiments, the skilled artisan can identify residues and portions of the molecules that are conserved among similar polypeptides. In further embodiments, even areas that may be important for biological activity or for structure may be subject to conservative amino acid substitutions without destroying the biological activity or without adversely affecting the polypeptide structure.

[0098] Additionally, one skilled in the art can review structure-function studies identifying residues in similar polypeptides that are important for activity or structure. In view of such a comparison, the skilled artisan can predict the importance of amino acid residues in a polypeptide that correspond to amino acid residues important for activity or structure in similar polypeptides. One skilled in the art may opt for chemically similar amino acid substitutions for such predicted important amino acid residues.

[0099] One skilled in the art can also analyze the three-dimensional structure and amino acid sequence in relation to that structure in similar polypeptides. In view of such information, one skilled in the art may predict the alignment of amino acid residues of a polypeptide with respect to its three-dimensional structure. In various embodiments, one skilled in the art may choose to not make radical changes to amino acid residues predicted to be on the surface of the polypeptide, since such residues may be involved in important interactions with other molecules. Moreover, one skilled in the art may generate test variants containing a single amino acid substitution at each desired amino acid residue. The variants can then be screened using activity assays known to those skilled in the art. Such variants could be used to gather information about suitable variants. For example, if one discovered that a change to a particular amino acid residue resulted in destroyed, undesirably reduced, or unsuitable activity, variants with such a change can be avoided. In other words, based on information gathered from such routine experiments, one skilled in the art can readily determine the amino acids where further substitutions should be avoided either alone or in combination with other mutations.

[0100] The term “polypeptide fragment” and “truncated polypeptide” as used herein refers to a polypeptide that has an amino-terminal and/or carboxy-terminal deletion as compared to a corresponding full-length protein. In various embodiments, fragments can be, e.g., at least 5, at least 10, at least 25, at least 50, at least 100, at least 150, at least 200, at least 250, at least 300, at least 350, at least 400, at least 450, at least 500, at least 600, at least 700, at least 800, at least 900 or at least 1000 amino acids in length. In various embodiments, fragments can also be, e.g., at most 1000, at most 900, at most 800, at most 700, at most 600, at most 500, at most 450, at most 400, at most 350, at most 300, at most 250, at most 200, at most 150, at most 100, at most 50, at most 25, at most 10, or at most 5 amino acids in length. A fragment can further comprise, at either or both of its ends, one or more additional amino acids, for example, a sequence of amino acids from a different naturally-occurring protein (e.g., an Fc or leucine zipper domain) or an artificial amino acid sequence (e.g., an artificial linker sequence).

[0101] The terms “polypeptide variant”, “hybrid polypeptide” and “polypeptide mutant” as used herein refers to a polypeptide that comprises an amino acid sequence wherein one or more amino acid residues are inserted into, deleted from and/or substituted into the amino acid sequence relative to another polypeptide sequence. In various embodiments, the number of amino acid residues to be inserted, deleted, or substituted can be, e.g., at least 1, at least 2, at least 3, at least 4, at least 5, at least 10, at least 25, at least 50, at least 75, at least 100, at least 125, at least 150, at least 175, at least 200, at least 225, at least 250, at least 275, at least 300, at least 350, at least 400, at least 450 or at least 500 amino acids in length. Hybrids of the present disclosure include fusion proteins.

[0102] A “derivative” of a polypeptide is a polypeptide that has been chemically modified, e.g., conjugation to another chemical moiety such as, for example, polyethylene glycol, albumin (e.g., human serum albumin), phosphorylation, and glycosylation.

[0103] The term “% sequence identity” is used interchangeably herein with the term “% identity” and refers to the level of amino acid sequence identity between two or more peptide sequences or the level of nucleotide sequence identity between two or more nucleotide sequences, when aligned using a sequence alignment program. For example, as used herein, 80% identity means the same thing as 80% sequence identity determined by a defined algorithm and means that a given sequence is at least 80% identical to another length of another sequence. In various embodiments, the % identity is selected from, e.g., at least 60%, at least 65%, at least 70%, at least 75%, at least 80%, at least 85%, at least 90%, at least 95%, or at least 99% or more sequence identity to a given sequence. In various embodiments, the % identity is in the range of, e.g., about 60% to about 70%, about 70% to about 80%, about 80% to about 85%, about 85% to about 90%, about 90% to about 95%, or about 95% to about 99%.

[0104] The term “% sequence homology” is used interchangeably herein with the term “% homology” and refers to the level of amino acid sequence homology between two or more peptide sequences or the level of nucleotide sequence homology between two or more nucleotide sequences, when aligned using a sequence alignment program. For example, as used herein, 80% homology means the same thing as 80% sequence homology determined by a defined algorithm, and accordingly a homologue of a given sequence has greater than 80% sequence homology over a length of the given sequence. In various embodiments, the % homology is selected from, e.g., at least 60%, at least 65%, at least 70%, at least 75%, at least 80%, at least 85%, at least 90%, at least 95%, or at least 99% or more sequence homology to a given sequence. In various embodiments, the % homology is in the range of, e.g., about 60% to about 70%, about 70% to about 80%, about 80% to about 85%, about 85% to about 90%, about 90% to about 95%, or about 95% to about 99%.

[0105] Exemplary computer programs which can be used to determine identity between two sequences include, but are not limited to, the suite of BLAST programs, e.g., BLASTN, BLASTX, and TBLASTX, BLASTP and TBLASTN, publicly available on the Internet at the NCBI website. See also Altschul et al., J. Mol. Biol. 215:403-10, 1990 (with special reference to the published default setting, i.e., parameters w=4, t=17) and Altschul et al., Nucleic Acids Res., 25:3389-3402, 1997. Sequence searches are typically carried out using the BLASTP program when evaluating a given amino acid sequence relative to amino acid sequences in the GenBank Protein Sequences and other public databases. The BLASTX program is preferred for searching nucleic acid sequences that have been translated in all reading frames against amino acid sequences in the GenBank Protein Sequences and other public databases. Both BLASTP and BLASTX are run using default parameters of an open gap penalty of 11.0, and an extended gap penalty of 1.0, and utilize the BLOSUM-62 matrix.

[0106] In addition to calculating percent sequence identity, the BLAST algorithm also performs a statistical analysis of the similarity between two sequences (see, e.g., Karlin & Altschul, Proc. Nat'l. Acad. Sci. USA, 90:5873-5787, 1993). One measure of similarity provided by the BLAST algorithm is the smallest sum probability (P(N)), which provides an indication of the probability by which a match between two nucleotide or amino acid sequences would occur by chance. For example, a nucleic acid is considered similar to a reference sequence if the smallest sum probability in a comparison of the test nucleic acid to the reference nucleic acid is, e.g., less than about 0.1, less than about 0.01, or less than about 0.001.

[0107] The term “modification” as used herein refers to any manipulation of the peptide backbone (e.g. amino acid sequence) or the post-translational modifications (e.g. glycosylation) of a polypeptide.

[0108] The term “knob-into-hole modification” as used herein refers to a modification within the interface between two immunoglobulin heavy chains in the CH3 domain. In one embodiment, the “knob-into-hole modification” comprises the amino acid substitution T366W and optionally the amino acid substitution S354C in one of the antibody heavy chains, and the amino acid substitutions T366S, L368A, Y407V and optionally Y349C in the other one of the antibody heavy chains. The knob-into-hole technology is described e.g. in U.S. Pat. Nos. 5,731,168; 7,695,936; Ridgway et al., Prot Eng 9, 617-621 (1996) and Carter, J Immunol Meth 248, 7-15 (2001).

[0109] The term “fusion protein” as used herein refers to a fusion polypeptide molecule comprising two or more genes that originally coded for separate proteins, wherein the components of the fusion protein are linked to each other by peptide-bonds, either directly or through peptide linkers. The term “fused” as used herein refers to components that are linked by peptide bonds, either directly or via one or more peptide linkers.

[0110] “Linker” refers to a molecule that joins two other molecules, either covalently, or through ionic, van der Waals or hydrogen bonds, e.g., a nucleic acid molecule that hybridizes to one complementary sequence at the 5′ end and to another complementary sequence at the 3′ end, thus joining two non-complementary sequences. A “cleavable linker” refers to a linker that can be degraded or otherwise severed to separate the two components connected by the cleavable linker. Cleavable linkers are generally cleaved by enzymes, typically peptidases, proteases, nucleases, lipases, and the like. Cleavable linkers may also be cleaved by environmental cues, such as, for example, changes in temperature, pH, salt concentration, etc.

[0111] The term “peptide linker” as used herein refers to a peptide comprising one or more amino acids, typically about 2-20 amino acids. Peptide linkers are known in the art or are described herein. Suitable, non-immunogenic linker peptides include, for example, (G₄S)ₙ, (SG₄)ₙ or G₄(SG₄)n peptide linkers. “n” is generally a number between 1 and 10, typically between 2 and 4.

[0112] “Pharmaceutical composition” refers to a composition suitable for pharmaceutical use in an animal. A pharmaceutical composition comprises a pharmacologically effective amount of an active agent and a pharmaceutically acceptable carrier. “Pharmacologically effective amount” refers to that amount of an agent effective to produce the intended pharmacological result. “Pharmaceutically acceptable carrier” refers to any of the standard pharmaceutical carriers, vehicles, buffers, and excipients, such as a phosphate buffered saline solution, 5% aqueous solution of dextrose, and emulsions, such as an oil/water or water/oil emulsion, and various types of wetting agents and/or adjuvants. Suitable pharmaceutical carriers and formulations are described in Remington's Pharmaceutical Sciences, 21st Ed. 2005, Mack Publishing Co, Easton. A “pharmaceutically acceptable salt” is a salt that can be formulated into a compound for pharmaceutical use including, e.g., metal salts (sodium, potassium, magnesium, calcium, etc.) and salts of ammonia or organic amines.

[0113] As used herein, “treatment” (and grammatical variations thereof such as “treat” or “treating”) refers to clinical intervention in an attempt to alter the natural course of a disease in the individual being treated and can be performed either for prophylaxis or during the course of clinical pathology. Desirable effects of treatment include, but are not limited to, preventing occurrence or recurrence of disease, alleviation of symptoms, diminishment of any direct or indirect pathological consequences of the disease, preventing metastasis, decreasing the rate of disease progression, amelioration or palliation of the disease state, and remission or improved prognosis. As used herein, to “alleviate” a disease, disorder or condition means reducing the severity and/or occurrence frequency of the symptoms of the disease, disorder, or condition. Further, references herein to “treatment” include references to curative, palliative and prophylactic treatment.

[0114] The term “effective amount” or “therapeutically effective amount” as used herein refers to an amount of a compound or composition sufficient to treat a specified disorder, condition or disease such as ameliorate, palliate, lessen, and/or delay one or more of its symptoms. In reference to cancers or other unwanted cell proliferation, an effective amount comprises an amount sufficient to: (i) reduce the number of cancer cells; (ii) reduce tumor size; (iii) inhibit, retard, slow to some extent and preferably stop cancer cell infiltration into peripheral organs; (iv) inhibit (i.e., slow to some extent and preferably stop) tumor metastasis; (v) inhibit tumor growth; (vi) prevent or delay occurrence and/or recurrence of tumor; and/or (vii) relieve to some extent one or more of the symptoms associated with the cancer. An effective amount can be administered in one or more administrations.

[0115] The phrase “administering” or “cause to be administered” refers to the actions taken by a medical professional (e.g., a physician), or a person controlling medical care of a patient, that control and/or permit the administration of the agent(s)/compound(s) at issue to the patient. Causing to be administered can involve diagnosis and/or determination of an appropriate therapeutic regimen, and/or prescribing particular agent(s)/compounds for a patient. Such prescribing can include, for example, drafting a prescription form, annotating a medical record, and the like. Where administration is described herein, “causing to be administered” is also contemplated.

[0116] The terms “patient,” “individual,” and “subject” may be used interchangeably and refer to a mammal, preferably a human or a non-human primate, but also domesticated mammals (e.g., canine or feline), laboratory mammals (e.g., mouse, rat, rabbit, hamster, guinea pig), and agricultural mammals (e.g., equine, bovine, porcine, ovine). In various embodiments, the patient can be a human (e.g., adult male, adult female, adolescent male, adolescent female, male child, female child) under the care of a physician or other health worker in a hospital, psychiatric care facility, as an outpatient, or other clinical context. In various embodiments, the patient may be an immunocompromised patient or a patient with a weakened immune system including, but not limited to patients having primary immune deficiency, AIDS; cancer and transplant patients who are taking certain immunosuppressive drugs; and those with inherited diseases that affect the immune system (e.g., congenital agammaglobulinemia, congenital IgA deficiency). In various embodiments, the patient has an immunogenic cancer, including, but not limited to bladder cancer, lung cancer, melanoma, and other cancers reported to have a high rate of mutations (Lawrence et al., Nature, 499(7457): 214-218, 2013).

[0117] The term “immunotherapy” refers to cancer treatments which include, but are not limited to, treatment using depleting antibodies to specific tumor antigens; treatment using antibody-drug conjugates; treatment using agonistic, antagonistic, or blocking antibodies to co-stimulatory or co-inhibitory molecules (immune checkpoints) such as CTLA-4, PD-1, OX-40, CD137, GITR, LAGS, TIM-3, SIRP, CD40, CD47, Siglec 8, Siglec 9, Siglec 15, TIGIT and VISTA; treatment using bispecific T cell engaging antibodies (BiTE®) such as blinatumomab: treatment involving administration of biological response modifiers such as IL-2, IL-12, IL-15, IL-21, GM-CSF, IFN-α, IFN-β and IFN-γ; treatment using therapeutic vaccines such as sipuleucel-T; treatment using Bacilli Calmette-Guerin (BCG); treatment using dendritic cell vaccines, or tumor antigen peptide vaccines; treatment using chimeric antigen receptor (CAR)-T cells; treatment using CAR-NK cells; treatment using tumor infiltrating lymphocytes (TILs); treatment using adoptively transferred anti-tumor T cells (ex vivo expanded and/or TCR transgenic); treatment using TALL-104 cells; and treatment using immunostimulatory agents such as Toll-like receptor (TLR) agonists CpG and imiquimod.

[0118] “Resistant or refractory cancer” refers to tumor cells or cancer that do not respond to previous anti-cancer therapy including, e.g., chemotherapy, surgery, radiation therapy, stem cell transplantation, and immunotherapy. Tumor cells can be resistant or refractory at the beginning of treatment, or they may become resistant or refractory during treatment. Refractory tumor cells include tumors that do not respond at the onset of treatment or respond initially for a short period but fail to respond to treatment. Refractory tumor cells also include tumors that respond to treatment with anticancer therapy but fail to respond to subsequent rounds of therapies. For purposes of this invention, refractory tumor cells also encompass tumors that appear to be inhibited by treatment with anticancer therapy but recur up to five years, sometimes up to ten years or longer after treatment is discontinued. The anticancer therapy can employ chemotherapeutic agents alone, radiation alone, targeted therapy alone, immunotherapy alone, surgery alone, or combinations thereof. For ease of description and not limitation, it will be understood that the refractory tumor cells are interchangeable with resistant tumor.

[0119] The term “Fc domain” or “Fc region” as used herein is used to define a C-terminal region of an immunoglobulin heavy chain that contains at least a portion of the constant region. The term includes native sequence Fc regions and variant Fc regions. An IgG Fc region comprises an IgG CH2 and an IgG CH3 domain. The CH3 region herein may be a native sequence CH3 domain or a variant CH3 domain (e.g. a CH3 domain with an introduced “protuberance” (“knob”) in one chain thereof and a corresponding introduced “cavity” (“hole”) in the other chain thereof; see U.S. Pat. No. 5,821,333, expressly incorporated herein by reference). Such variant CH3 domains may be used to promote heterodimerization of two non-identical immunoglobulin heavy chains as herein described. Unless otherwise specified herein, numbering of amino acid residues in the Fc region or constant region is according to the EU numbering system.

[0120] The term “effector functions” as used herein refers to those biological activities attributable to the Fc region of an immunoglobulin, which vary with the immunoglobulin isotype. Examples of immunoglobulin effector functions include: Clq binding and complement dependent cytotoxicity (CDC), Fc receptor binding, antibody-dependent cell-mediated cytotoxicity (ADCC), antibody-dependent cellular phagocytosis (ADCP), cytokine secretion, immune complex-mediated antigen uptake by antigen presenting cells, down regulation of cell surface receptors (e.g. B cell receptor), and B cell activation.

[0121] The term “regulatory T cell” or “Treg cell” as used herein is meant a specialized type of CD4+ T cell that can suppress the responses of other T cells (effector T cells). Treg cells are characterized by expression of CD4, the a-subunit of the IL-2 receptor (CD25), and the transcription factor forkhead box P3 (FOXP3) (Sakaguchi, Annu Rev Immunol 22, 531-62 (2004)) and play a critical role in the induction and maintenance of peripheral self-tolerance to antigens, including those expressed by tumors.

[0122] The term “conventional CD4+ T cells” as used herein is meant CD4+ T cells other than regulatory T cells.

[0123] The term “selective activation of Treg cells” as used herein is meant activation of Treg cells essentially without concomitant activation of other T cell subsets (such as CD4+ T helper cells, CD8+ cytotoxic T cells, NK T cells) or natural killer (NK) cells. Methods for identifying and distinguishing these cell types are described in the Examples. Activation may include induction of IL-2 receptor signaling (as measured e.g. by detection of phosphorylated STAT5a), induction of proliferation (as measured e.g. by detection of Ki-67) and/or up-regulation of expression of activation markers (such as e.g. CD25).

[0124] As used herein, “specific binding” is meant that the binding is selective for the antigen and can be discriminated from unwanted or non-specific interactions. The ability of an immunoglobulin to bind to a specific antigen can be measured either through an enzyme-linked immunosorbent assay (ELISA) or other techniques familiar to one of skill in the art, e.g. Surface Plasmon Resonance (SPR) technique.

[0125] The terms “affinity” or “binding affinity” as used herein refers to the strength of the sum total of non-covalent interactions between a single binding site of a molecule (e.g. an antibody) and its binding partner (e.g. an antigen). The affinity of a molecule X for its partner Y can generally be represented by the dissociation constant (KD), which is the ratio of dissociation and association rate constants (koff and kon, respectively). A particular method for measuring affinity is Surface Plasmon Resonance (SPR).

[0126] The term “reduced binding”, as used herein refers to a decrease in affinity for the respective interaction, as measured for example by SPR. Conversely, “increased binding” refers to an increase in binding affinity for the respective interaction.

[0127] The term “polymer” as used herein generally includes, but is not limited to, homopolymers; copolymers, such as, for example, block, graft, random and alternating copolymers; and terpolymers; and blends and modifications thereof. Furthermore, unless otherwise specifically limited, the term “polymer” shall include all possible geometrical configurations of the material. These configurations include, but are not limited to isotactic, syndiotactic, and random symmetries.

[0128] “Polynucleotide” refers to a polymer composed of nucleotide units. Polynucleotides include naturally occurring nucleic acids, such as deoxyribonucleic acid (“DNA”) and ribonucleic acid (“RNA”) as well as nucleic acid analogs. Nucleic acid analogs include those which include non-naturally occurring bases, nucleotides that engage in linkages with other nucleotides other than the naturally occurring phosphodiester bond or which include bases attached through linkages other than phosphodiester bonds. Thus, nucleotide analogs include, for example and without limitation, phosphorothioates, phosphorodithioates, phosphorotriesters, phosphoramidates, boranophosphates, methylphosphonates, chiral-methyl phosphonates, 2-O-methyl ribonucleotides, peptide-nucleic acids (PNAs), and the like. Such polynucleotides can be synthesized, for example, using an automated DNA synthesizer. The term “nucleic acid” typically refers to large polynucleotides. The term “oligonucleotide” typically refers to short polynucleotides, generally no greater than about 50 nucleotides. It will be understood that when a nucleotide sequence is represented by a DNA sequence (i.e., A, T, G, C), this also includes an RNA sequence (i.e., A, U, G, C) in which “U” replaces “T.”

[0129] Conventional notation is used herein to describe polynucleotide sequences: the left-hand end of a single-stranded polynucleotide sequence is the 5′-end; the left-hand direction of a double-stranded polynucleotide sequence is referred to as the 5′-direction. The direction of 5′ to 3′ addition of nucleotides to nascent RNA transcripts is referred to as the transcription direction. The DNA strand having the same sequence as an mRNA is referred to as the “coding strand”; sequences on the DNA strand having the same sequence as an mRNA transcribed from that DNA and which are located 5′ to the 5′-end of the RNA transcript are referred to as “upstream sequences”; sequences on the DNA strand having the same sequence as the RNA and which are 3′ to the 3′ end of the coding RNA transcript are referred to as “downstream sequences.”

[0130] “Complementary” refers to the topological compatibility or matching together of interacting surfaces of two polynucleotides. Thus, the two molecules can be described as complementary, and furthermore, the contact surface characteristics are complementary to each other. A first polynucleotide is complementary to a second polynucleotide if the nucleotide sequence of the first polynucleotide is substantially identical to the nucleotide sequence of the polynucleotide binding partner of the second polynucleotide, or if the first polynucleotide can hybridize to the second polynucleotide under stringent hybridization conditions.

[0131] “Hybridizing specifically to” or “specific hybridization” or “selectively hybridize to”, refers to the binding, duplexing, or hybridizing of a nucleic acid molecule preferentially to a particular nucleotide sequence under stringent conditions when that sequence is present in a complex mixture (e.g., total cellular) DNA or RNA. The term “stringent conditions” refers to conditions under which a probe will hybridize preferentially to its target subsequence, and to a lesser extent to, or not at all to, other sequences. “Stringent hybridization” and “stringent hybridization wash conditions” in the context of nucleic acid hybridization experiments such as Southern and northern hybridizations are sequence-dependent and are different under different environmental parameters. An extensive guide to the hybridization of nucleic acids can be found in Tijssen, 1993, Laboratory Techniques in Biochemistry and Molecular Biology—Hybridization with Nucleic Acid Probes, part I, chapter 2, “Overview of principles of hybridization and the strategy of nucleic acid probe assays”, Elsevier, N.Y.; Sambrook et al., 2001, Molecular Cloning: A Laboratory Manual, Cold Spring Harbor Laboratory, 3.sup.rd ed., NY; and Ausubel et al., eds., Current Edition, Current Protocols in Molecular Biology, Greene Publishing Associates and Wiley Interscience, NY.

[0132] Generally, highly stringent hybridization and wash conditions are selected to be about 5° C. lower than the thermal melting point (Tm) for the specific sequence at a defined ionic strength and pH. The Tm is the temperature (under defined ionic strength and pH) at which 50% of the target sequence hybridizes to a perfectly matched probe. Very stringent conditions are selected to be equal to the Tm for a particular probe. An example of stringent hybridization conditions for hybridization of complementary nucleic acids which have more than about 100 complementary residues on a filter in a Southern or northern blot is 50% formalin with 1 mg of heparin at 42° C., with the hybridization being carried out overnight. An example of highly stringent wash conditions is 0.15 M NaCl at 72° C. for about 15 minutes. An example of stringent wash conditions is a 0.2×SSC wash at 65° C. for 15 minutes. See Sambrook et al. for a description of SSC buffer. A high stringency wash can be preceded by a low stringency wash to remove background probe signal. An exemplary medium stringency wash for a duplex of, e.g., more than about 100 nucleotides, is 1×SSC at 45° C. for 15 minutes. An exemplary low stringency wash for a duplex of, e.g., more than about 100 nucleotides, is 4-6×SSC at 40° C. for 15 minutes. In general, a signal to noise ratio of 2× (or higher) than that observed for an unrelated probe in the particular hybridization assay indicates detection of a specific hybridization.

[0133] “Primer” refers to a polynucleotide that is capable of specifically hybridizing to a designated polynucleotide template and providing a point of initiation for synthesis of a complementary polynucleotide. Such synthesis occurs when the polynucleotide primer is placed under conditions in which synthesis is induced, i.e., in the presence of nucleotides, a complementary polynucleotide template, and an agent for polymerization such as DNA polymerase. A primer is typically single-stranded but may be double-stranded. Primers are typically deoxyribonucleic acids, but a wide variety of synthetic and naturally occurring primers are useful for many applications. A primer is complementary to the template to which it is designed to hybridize to serve as a site for the initiation of synthesis but need not reflect the exact sequence of the template. In such a case, specific hybridization of the primer to the template depends on the stringency of the hybridization conditions. Primers can be labeled with, e.g., chromogenic, radioactive, or fluorescent moieties and used as detectable moieties.

[0134] “Probe,” when used in reference to a polynucleotide, refers to a polynucleotide that is capable of specifically hybridizing to a designated sequence of another polynucleotide. A probe specifically hybridizes to a target complementary polynucleotide but need not reflect the exact complementary sequence of the template. In such a case, specific hybridization of the probe to the target depends on the stringency of the hybridization conditions. Probes can be labeled with, e.g., chromogenic, radioactive, or fluorescent moieties and used as detectable moieties. In instances where a probe provides a point of initiation for synthesis of a complementary polynucleotide, a probe can also be a primer.

[0135] A “vector” is a polynucleotide that can be used to introduce another nucleic acid linked to it into a cell. One type of vector is a “plasmid,” which refers to a linear or circular double stranded DNA molecule into which additional nucleic acid segments can be ligated. Another type of vector is a viral vector (e.g., replication defective retroviruses, adenoviruses and adeno-associated viruses), wherein additional DNA segments can be introduced into the viral genome. Certain vectors are capable of autonomous replication in a host cell into which they are introduced (e.g., bacterial vectors comprising a bacterial origin of replication and episomal mammalian vectors). Other vectors (e.g., non-episomal mammalian vectors) are integrated into the genome of a host cell upon introduction into the host cell, and thereby are replicated along with the host genome. An “expression vector” is a type of vector that can direct the expression of a chosen polynucleotide.

[0136] A “regulatory sequence” is a nucleic acid that affects the expression (e.g., the level, timing, or location of expression) of a nucleic acid to which it is operably linked. The regulatory sequence can, for example, exert its effects directly on the regulated nucleic acid, or through the action of one or more other molecules (e.g., polypeptides that bind to the regulatory sequence and/or the nucleic acid). Examples of regulatory sequences include promoters, enhancers and other expression control elements (e.g., polyadenylation signals). Further examples of regulatory sequences are described in, for example, Goeddel, 1990, Gene Expression Technology: Methods in Enzymology 185, Academic Press, San Diego, Calif. and Baron et al., 1995, Nucleic Acids Res. 23:3605-06. A nucleotide sequence is “operably linked” to a regulatory sequence if the regulatory sequence affects the expression (e.g., the level, timing, or location of expression) of the nucleotide sequence.

[0137] A “host cell” is a cell that can be used to express a polynucleotide of the disclosure. A host cell can be a prokaryote, for example, E. coli, or it can be a eukaryote, for example, a single-celled eukaryote (e.g., a yeast or other fungus), a plant cell (e.g., a tobacco or tomato plant cell), an animal cell (e.g., a human cell, a monkey cell, a hamster cell, a rat cell, a mouse cell, or an insect cell) or a hybridoma. Typically, a host cell is a cultured cell that can be transformed or transfected with a polypeptide-encoding nucleic acid, which can then be expressed in the host cell. The phrase “recombinant host cell” can be used to denote a host cell that has been transformed or transfected with a nucleic acid to be expressed. A host cell also can be a cell that comprises the nucleic acid but does not express it at a desired level unless a regulatory sequence is introduced into the host cell such that it becomes operably linked with the nucleic acid. It is understood that the term host cell refers not only to the particular subject cell but also to the progeny or potential progeny of such a cell. Because certain modifications may occur in succeeding generations due to, e.g., mutation or environmental influence, such progeny may not, in fact, be identical to the parent cell, but are still included within the scope of the term as used herein.

[0138] The term “isolated molecule” (where the molecule is, for example, a polypeptide or a polynucleotide) is a molecule that by virtue of its origin or source of derivation (1) is not associated with naturally associated components that accompany it in its native state, (2) is substantially free of other molecules from the same species (3) is expressed by a cell from a different species, or (4) does not occur in nature. Thus, a molecule that is chemically synthesized, or expressed in a cellular system different from the cell from which it naturally originates, will be “isolated” from its naturally associated components. A molecule also may be rendered substantially free of naturally associated components by isolation, using purification techniques well known in the art. Molecule purity or homogeneity may be assayed by a number of means well known in the art. For example, the purity of a polypeptide sample may be assayed using polyacrylamide gel electrophoresis and staining of the gel to visualize the polypeptide using techniques well known in the art. For certain purposes, higher resolution may be provided by using HPLC or other means well known in the art for purification.

[0139] A protein or polypeptide is “substantially pure,” “substantially homogeneous,” or “substantially purified” when at least about 60% to 75% of a sample exhibits a single species of polypeptide. The polypeptide or protein may be monomeric or multimeric. A substantially pure polypeptide or protein will typically comprise about 50%, 60%, 70%, 80% or 90% W/W of a protein sample, more usually about 95%, and preferably will be over 99% pure. Protein purity or homogeneity may be indicated by a number of means well known in the art, such as polyacrylamide gel electrophoresis of a protein sample, followed by visualizing a single polypeptide band upon staining the gel with a stain well known in the art. For certain purposes, higher resolution may be provided by using HPLC or other means well known in the art for purification.

[0140] The terms “label” or “labeled” as used herein refers to incorporation of another molecule in the antibody. In one embodiment, the label is a detectable marker, e.g., incorporation of a radiolabeled amino acid or attachment to a polypeptide of biotinyl moieties that can be detected by marked avidin (e.g., streptavidin containing a fluorescent marker or enzymatic activity that can be detected by optical or calorimetric methods). In another embodiment, the label or marker can be therapeutic, e.g., a drug conjugate or toxin. Various methods of labeling polypeptides and glycoproteins are known in the art and may be used. Examples of labels for polypeptides include, but are not limited to, the following: radioisotopes or radionuclides (e.g., ³H, ¹⁴C, ¹⁵N, ³⁵S, ⁹⁰Y, ⁹⁹Tc, ¹¹¹In, ¹²⁵I, ¹³¹I), fluorescent labels (e.g., FITC, rhodamine, lanthanide phosphors), enzymatic labels (e.g., horseradish peroxidase, β-galactosidase, luciferase, alkaline phosphatase), chemiluminescent markers, biotinyl groups, predetermined polypeptide epitopes recognized by a secondary reporter (e.g., leucine zipper pair sequences, binding sites for secondary antibodies, metal binding domains, epitope tags), magnetic agents, such as gadolinium chelates, toxins such as pertussis toxin, taxol, cytochalasin B, gramicidin D, ethidium bromide, emetine, mitomycin, etoposide, tenoposide, vincristine, vinblastine, colchicine, doxorubicin, daunorubicin, dihydroxy anthracin dione, mitoxantrone, mithramycin, actinomycin D, 1-dehydrotestosterone, glucocorticoids, procaine, tetracaine, lidocaine, propranolol, and puromycin and analogs or homologs thereof. In various embodiments, labels are attached by spacer arms of various lengths to reduce potential steric hindrance.

[0141] The term “heterologous” as used herein refers to a composition or state that is not native or naturally found, for example, that may be achieved by replacing an existing natural composition or state with one that is derived from another source. Similarly, the expression of a protein in an organism other than the organism in which that protein is naturally expressed constitutes a heterologous expression system and a heterologous protein.

[0142] It is understood that aspect and embodiments of the disclosure described herein include “consisting” and/or “consisting essentially of” aspects and embodiments.

[0143] Reference to “about” a value or parameter herein includes (and describes) variations that are directed to that value or parameter per se. For example, description referring to “about X” includes description of “X”.

[0144] As used herein and in the appended claims, the singular forms “a,” “or,” and “the” include plural referents unless the context clearly dictates otherwise. It is understood that aspects and variations of the disclosure described herein include “consisting” and/or “consisting essentially of” aspects and variations.

### IL-2

[0145] Interleukin-2 (IL-2), a classic Th1 cytokine, is produced by T cells after activation through the T-cell antigen receptor and the co-stimulatory molecule CD28. The regulation of IL-2 occurs through activation of signaling pathways and transcription factors that act on the IL-2 promoter to generate new gene transcription, but also involves modulation of the stability of IL-2 mRNA. IL-2 binds to a multichain receptor, including a highly regulated a chain and β and γ chains that mediate signaling through the Jak-STAT pathway. IL-2 delivers activation, growth, and differentiation signals to T cells, B cells, and NK cells. IL-2 is also important in mediating activation-induced cell death of T cells, a function that provides an essential mechanism for terminating immune responses. A commercially available unglycosylated human recombinant IL-2 product, aldesleukin (available as the PROLEUKIN® brand of des-alanyl-1, serine-125 human interleukin-2 from Prometheus Laboratories Inc., San Diego Calif.), has been approved for administration to patients suffering from metastatic renal cell carcinoma and metastatic melanoma. IL-2 has also been suggested for administration in patients suffering from or infected with hepatitis C virus (HCV), human immunodeficiency virus (HIV), acute myeloid leukemia, non-Hodgkin's lymphoma, cutaneous T-cell lymphoma, juvenile rheumatoid arthritis, atopic dermatitis, breast cancer and bladder cancer. Unfortunately, short half-life and severe toxicity limits the optimal dosing of IL-2.

[0146] As used herein, the terms “native IL-2” and “native interleukin-2” in the context of proteins or polypeptides refer to any naturally occurring mammalian interleukin-2 amino acid sequences, including immature or precursor and mature forms. Non-limiting examples of GenBank Accession Nos. for the amino acid sequence of various species of native mammalian interleukin-2 include NP 032392.1 (Mus musculus, immature form), NP_001040595.1 (Macaca mulatta, immature form), NP_000577.2 (human, precursor form), CAA01199.1 (human, immature form), AAD48509.1 (human, immature form), and AAB20900.1 (human). In various embodiments of the present invention, native IL-2 is the immature or precursor form of a naturally occurring mammalian IL-2. In other embodiments, native IL-2 is the mature form of a naturally occurring mammalian IL-2. In various embodiments, native IL-2 is the precursor form of naturally occurring human IL-2. In various embodiments, native IL-2 is the mature form of naturally occurring human IL-2. In various embodiments, the IL-2-based domain D2 is derived from the amino acid sequence of the human IL-2 precursor sequence set forth in SEQ ID NO: 1:

(SEQ ID NO: 1)
MYRMQLLSCIALSLALVTNSAPTSSSTKKTQLQLEHLLLDLQMILNGIN
NYKNPKLTRMLTFKFYMPKKATELKHLQCLEEELKPLEEVLNLAQSKNF
HLRPRDLISNINVIVLELKGSETTFMCEYADETATIVEFLNRWITFCQS
IISTLT

[0147] In various embodiments, the IL-2-based domain D2 comprises the amino acid sequence of the human IL-2 mature form wild type sequence set forth in SEQ ID NO: 3, which contains substitution of cysteine at position 125 to serine, but does not alter IL-2 receptor binding compared to the naturally occurring IL-2:

(SEQ ID NO: 3)
APTSSSTKKTQLQLEHLLLDLQMILNGINNYKNPKLTRMLTFKFYMPKK
ATELKHLQCLEEELKPLEEVLNLAQSKNFHLRPRDLISNINVIVLELKG
SETTFMCEYADETATIVEFLNRWITFSQSIISTLT

### IL-2 Variants

[0148] The present invention relates to polypeptides which share primary sequence with human IL-2, except for several amino acids that have been mutated (include amino acid substitution, deletion, and insertion). One panel of IL-2 variants comprise mutations that preferentially promotes the proliferation, survival, activation and/or function of immunosuppressive regulatory T cells ((T CD4+CD25+FoxP3+) over effector T cells and NK cells. Also includes therapeutic uses of such IL-2 selective agonist, used alone, or in combination with disease tissue targeting protein or peptide, or as the building block in bifunctional molecule construct, to treat autoimmune and various inflammatory disorders. Another panel of IL-2 variants comprise mutations substantially reduce the ability of these polypeptides to stimulate Treg cells and make them more effective in the therapy of tumors. Also includes therapeutic uses of these mutated variants, used alone or in combination with vaccines, or TAA-targeting biologics, or immune checkpoint blocker, or as the building block in bifunctional molecule construct, for the therapy of diseases such as cancer or infections where the activity of regulatory T cells (Tregs) is undesirable. In another aspect the present invention relates to pharmaceutical compositions comprising the polypeptides disclosed. Finally, the present invention relates to the therapeutic use of the polypeptides and pharmaceutical compositions disclosed due to their selective modulating effect of the immune system on diseases like autoimmune and inflammatory disorders or cancer and various infectious diseases.

[0149] The present invention relates to polypeptides of 100 to 500 amino acids in length, preferably of 140 residues size whose apparent molecular weight is at least 15 kD. These polypeptides maintain high sequence identity, more than 90%, with native IL-2. In these positions, these polypeptides are mutated introducing amino acid residues different from those in the same position in the native IL-2.

[0150] The polypeptides of the present invention may be referred to as immunomodulatory polypeptides, IL-2 analogs or IL-2 variants, among other names. These polypeptides are designed based on the 3D structure of the IL-2 receptor complex (available in PDB public database), introducing mutations mainly in the positions of the IL-2 corresponding to amino acids interacting with receptor subunit(s) α or β or γ or βγ.

[0151] In various embodiments, the IL-2 variant (or mutant) comprises a sequence derived from the sequence of the mature human IL-2 polypeptide as set forth in SEQ ID NO: 3. In various embodiments, the IL-2 variant comprises a different amino acid sequence than the native (or wild type) IL-2 protein. In various embodiments, the IL-2 variant binds the IL-2Rα polypeptide and functions as an IL-2 agonist or antagonist. In various embodiments, the IL-2 variants with agonist activity have super agonist activity. In various embodiments, the IL-2 variant can function as an IL-2 agonist or antagonist independent of its association with IL-2Rα. IL-2 agonists are exemplified by comparable or increased biological activity compared to wild type IL-2. IL-2 antagonists are exemplified by decreased biological activity compared to wild type IL-2 or by the ability to inhibit IL-2-mediated responses. In various embodiments, the sequence of the IL-2 variant has at least one amino acid change, e.g. substitution or deletion, compared to the native IL-2 sequence, such changes resulting in IL-2 agonist or antagonist activity. In various embodiments, the IL-2 variants as Fc fusion protein have the amino acid sequence set forth in SEQ ID NOs: 4-43, 113-151, 208-212, and 275-292 with reduced binding to IL-2Rβ and/or γ_{C} and enhanced selectivity in activating and proliferating regulatory T cells (Treg). In various embodiments, the IL-2 variants as Fc fusion protein have the amino acid sequence set forth in SEQ ID NO: 220-232 and 293-299 with reduced/abolished binding to IL-2Rα to selectively activate and proliferate effector T cells (Teff).

[0152] In various embodiments, IL-2RαSushi having the amino acid sequence set forth in SEQ ID NO: 68, was linked between IL-2 and Fc domains using linkers of various lengths and compositions. Fc domain can be in the N-terminus or C-terminus. IL-2-IL-2RαSushi-Fc fusion protein have the amino acid sequence set forth in SEQ ID NO: 69-70 is expected to have reduced binding to IL-2Rα to selectively activate and proliferate effector T cells.

[0153] In various embodiments, IL-2 and IL-2RαSushi form non-covalent complexation. IL-2 was fused to either N- or C-terminus of a Hole-Fc chain (SEQ ID NO: 47), and IL-2RαSushi was fused to either N- or C-terminus of a Knob-Fc chain (SEQ ID NO: 46). Non-covalent C-terminal IL-2-IL-2RαSushi-Fc fusion protein have the amino acid sequence set forth in SEQ ID NOS: 196-197.

[0154] Exemplary IL-2 variants are provided in Table 4A-4H:

TABLE 4A
IL-2 single mutations targeting both IL-2Rβ
interface and the proposed toxic motif

| | | Fc fusion protein | |
|---|---|---|---|
| Mutation | SEQ ID: NO | Protein ID | SEQ ID: NO |
| D20T | 5 | P-0363 | 74 |
| D20E | 6 | P-0364 | 75 |
| | | P-0412 | 107 |
| D20N | 7 | P-0365 | 76 |
| D20Q | 8 | P-0366 | 77 |
| D20S | 9 | P-0367 | 78 |
| D20Y | 10 | P-0368 | 79 |
| D20I | 11 | P-0252 | 80 |
| | | P-0306 | 108 |
| L19Y | 12 | P-0372 | 81 |
| L19N | 13 | P-0373 | 82 |
| | | P-0416 | 106 |
| L19R | 14 | P-0374 | 83 |
| L19Q | 37 | P-0423 | 152 |
| L19H | 38 | P-0424 | 153 |
| L19D | 39 | P-0425 | 154 |
| L19P | 40 | P-0426 | 155 |
| L19S | 113 | P-0427 | 156 |
| L21S | 114 | P-0428 | 157 |
| L21N | 115 | P-0429 | 158 |
| L21R | 116 | P-0430 | 159 |

TABLE 4B
IL-2 single Mutations targeting IL-2Rβ interface

| | | Fc fusion protein | |
|---|---|---|---|
| Mutation | SEQ ID: NO | Protein ID | SEQ ID: NO |
| N88R | 4 | P-0254 | 73 |
| | | P-0496 | 195 |
| N88G | 15 | P-0253 | 84 |
| N88I | 16 | P-0302 | 85 |
| N88Q | 17 | P-0375 | 86 |
| N88E | 18 | P-0376 | 87 |
| N88T | 19 | P-0377 | 88 |
| N88M | 20 | P-0378 | 89 |

TABLE 4C
IL-2 single mutations targeting γc receptor interface

| | | Fc fusion protein | |
|---|---|---|---|
| Mutation | SEQ ID: NO | Protein ID | SEQ ID: NO |
| Q126E | 21 | P-0303 | 90 |
| Q126L | 22 | P-0304 | 91 |
| Q126N | 23 | P-0369 | 92 |
| Q126D | 24 | P-0370 | 93 |
| Q126M | 25 | P-0371 | 94 |
| Q126K | 117 | P-0497 | 160 |
| Q126H | 118 | P-0498 | 161 |
| Q126Y | 119 | P-0499 | 162 |
| Q126R | 275 | X | X |
| Q126S | 276 | X | X |
| Q126T | 277 | X | X |
| S125E | 120 | P-0500 | 163 |
| S125K | 121 | P-0501 | 164 |
| S125H | 122 | P-0502 | 165 |
| S125W | 123 | P-0503 | 166 |
| S125I | 124 | P-0531 | 167 |
| Q22N | 125 | P-0505 | 168 |
| Q22H | 126 | P-0506 | 169 |
| Q22K | 127 | P-0507 | 170 |
| Q22Y | 128 | P-0508 | 171 |
| Q22I | 129 | P-0509 | 172 |

TABLE 4D
IL-2 mutation combinations targeting both
IL-2Rβ interface and the proposed toxic motif

| | | Fc fusion protein | |
|---|---|---|---|
| Mutation | SEQ ID: NO | Protein ID | SEQ ID: NO |
| D20I/N88G | 26 | P-0251 | 95 |
| D20I/N88R | 27 | P-0317 | 96 |
| | | P-0319 | 109 |
| D20T/N88R | 28 | P-0324 | 98 |
| D20I/N88I | 29 | P-0318 | 97 |

TABLE 4E
IL-2 mutation combinations targeting IL-2Rβ,
γc interfaces and the proposed toxic motif

| | | Fc fusion protein | |
|---|---|---|---|
| Mutation | SEQ ID: NO | Protein ID | SEQ ID: NO |
| D20T/Q126E | 30 | P-0322 | 99 |
| D20T/N88R/Q126E | 31 | P-0325 | 101 |
| D20T/Q126L | 32 | P-0323 | 100 |
| D20T/N88R/Q126L | 33 | P-0326 | 102 |
| L19N/Q126E | 34 | P-0417 | 103 |
| L19R/Q126E | 35 | P-0418 | 104 |
| L19Y/Q126E | 36 | P-0419 | 105 |
| L19H/Q126E | 130 | P-0447 | 173 |
| L19Q/Q126E | 131 | P-0448 | 174 |
| L19S/Q126E | 132 | P-0449 | 175 |
| L19Y/Q126K | 133 | p-0464 | 176 |
| L19Y/Q126H | 134 | P-0465 | 177 |
| L19Y/Q126Y | 135 | P-0466 | 178 |
| L19Y/S125E | 136 | P-0467 | 179 |
| L19Y/S125K | 137 | P-0468 | 180 |
| L19Y/S125H | 138 | P-0469 | 181 |
| L19Y/S125W | 139 | P-0470 | 182 |
| L19Y/S125I | 140 | P-0471 | 183 |
| L19Y/Q22N | 141 | P-0472 | 184 |
| L19Y/Q22H | 142 | P-0473 | 185 |
| L19Y/Q22K | 143 | P-0474 | 186 |
| L19Y/Q22Y | 144 | P-0475 | 187 |
| L19Y/Q22I | 145 | P-0476 | 188 |
| L19H/Q126K | 146 | P-0480 | 189 |
| L19H/S125I | 147 | P-0491 | 190 |
| L19D/S125I | 148 | P-0492 | 191 |
| D20E/S125I | 149 | P-0493 | 192 |
| D20T/S125I | 150 | P-0494 | 193 |
| D20T/S125I/Q126K | 41 | P-0582 | 110 |
| L19N/S125I/Q126K | 42 | P-0583 | 111 |
| L19R/S125I/Q126K | 43 | P-0584 | 112 |
| L19R/S125I/Q126E | 292 | X | X |
| L19Y/S125I/Q126E | 151 | P-0495 | 194 |
| L19H/S125I/Q126E | 208 | P-0511 | 213 |
| | | P-0585 | 218 |
| | | P-0616 | 219 |
| L19H/S125I/Q126K | 209 | P-0512 | 214 |
| L19Q/Q126K | 210 | P-0513 | 215 |
| L19Q/S125I/Q126E | 211 | P-0514 | 216 |
| L19Q/S125I/Q126K | 212 | P-0515 | 217 |
| L19D/S125I/Q126E | 278 | P-0860 | 300 |
| L19N/S125I/Q126E | 280 | P-0859 | 306 |
| D20E/S125I/Q126E | 279 | P-0861 | 301 |
| L19N/S125I/Q126K | 281 | X | X |
| L19H/S125I/Q126D | 282 | X | X |
| L19H/S125I/Q126H | 283 | X | X |
| L19H/S125I/Q126N | 284 | X | X |
| L19H/S125I/Q126R | 285 | X | X |
| L19H/S125I/Q126S | 286 | X | X |
| L19H/S125I/Q126T | 287 | X | X |

TABLE 4F
Single or combination IL-2 mutations to improve
manufacturability and interrupt binding of IL-2 to IL-2Rα

| | | Fc fusion protein | |
|---|---|---|---|
| Mutations/construct design | SEQ ID: NO | Protein ID | SEQ ID: NO |
| R38E/F42A/S125I | 220 | P-0615 | 235 |
| R38A/S125I | 221 | P-0602 | 236 |
| T41A/S125I | 222 | P-0603 | 237 |
| T41G/S125I | 223 | P-0604 | 238 |
| T41V/S125I | 224 | P-0605 | 239 |
| F44G/S125I | 225 | P-0606 | 240 |
| F44V/S125I | 226 | P-0607 | 241 |
| P65G/S125I | 227 | P-0608 | 242 |
| P65A/S125I | 293 | X | X |
| P65E/S125I | 294 | X | X |
| P65H/S125I | 295 | X | X |
| P65K/S125I | 296 | X | X |
| P65N/S125I | 297 | X | X |
| P65Q/S125I | 298 | X | X |
| P65R/S125I | 299 | X | X |
| Y107G/S125I | 228 | P-0609 | 243 |
| Y107H/S125I | 229 | P-0610 | 244 |
| Y107L/S125I | 230 | P-0611 | 245 |
| Y107V/S125I | 231 | P-0612 | 246 |
| R38A/P65G/S125I | 232 | P-0573 | 247 |
| F42A/S125I | 233 | P-0613 | 248 |
| R38E/S125I | 234 | P-0614 | 249 |

TABLE 4G
IL-2 and IL-2RαSushi covalently linked or non-
covalently complexed as Fc fusion proteins

| Construction design | Fusion protein ID | SEQ ID NO: |
|---|---|---|
| IL-2 linked to IL-2RαSushi at | P-0327 | 69 |
| C-terminal of Fc | | |
| IL-2 linked to IL-2RαSushi at | P-0422 | 70 |
| N-terminal of Fc | | |
| IL-2 and IL-2RαSushi non- | P-0482 | 196 + 197 |
| covalent complexed via | | |
| heterodimeric Fc | | |

TABLE 4H
IL-2 N-terminal deletion mutations in combinations
to amino acid substitutions targeting IL-2Rβ,
γc interfaces and the proposed toxic motif

| | | Fc fusion protein | |
|---|---|---|---|
| Mutations/construct design | SEQ ID: NO | Protein ID | SEQ ID: NO |
| L19D/S125I/Q126E + 5 amino | 288 | P-0862 | 302 |
| acid N-terminal deletion | | | |
| L19D/S125I/Q126E + 7 amino | 289 | P-0863 | 303 |
| acid N-terminal deletion | | | |
| L19D/S125I/Q126E + 9 amino | 290 | P-0864 | 304 |
| acid N-terminal deletion | | | |
| L19D/S125I/Q126E + 11 amino | 291 | P-0865 | 305 |
| acid N-terminal deletion | | | |

[0155] The present invention also includes additional modifications to the class of IL-2 variants mentioned above and especially to those described in Tables 4A-4F and 4H. As can be appreciated by skilled artisan, additional combination mutants combining the preferred mutations described in Tables 4A-4E and 4H may result in more Treg cell-selective IL-2 agonists; additional combination mutants combining the preferred mutations described in Table 4F may result in more Teff cell-selective IL-2 agonists. Any further combination mutants come with the spirit and scope of the present invention whether it is to increase their affinity to specific components of the IL-2 receptor, or to fine tune the activity to the desired potency, singling strength, and specificity, or to improve their in vivo pharmacodynamics: increase half-life or reduce their internalization by T cells. These additional mutations may be obtained by rational design with bioinformatics tools, or by using combinatorial molecular libraries of different nature (phage libraries, libraries of gene expression in yeast or bacteria). In another aspect the present invention relates to a fusion protein comprising any of the immunomodulatory polypeptides described above, coupled to a carrier protein. The carrier protein can be Albumin or the Fc region of human immunoglobulins. In another aspect the present invention relates to a fusion protein attached to a targeting/dual functional moiety. The targeting/dual functional moiety can be an antibody, an antibody fragment, a protein or a peptide.

### Fc Domains

[0156] Immunoglobulins of IgG class are among the most abundant proteins in human blood. Their circulation half-lives can reach as long as 21 days. Fusion proteins have been reported to combine the Fc regions of IgG with the domains of another protein, such as various cytokines and receptors (see, for example, Capon et al., Nature, 337:525-531, 1989; Chamow et al., Trends Biotechnol., 14:52-60, 1996); U.S. Pat. Nos. 5,116,964 and 5,541,087). The prototype fusion protein is a homodimeric protein linked through cysteine residues in the hinge region of IgG Fc, resulting in a molecule similar to an IgG molecule without the heavy chain variable and CH1 domains and light chains. The dimer nature of fusion proteins comprising the Fc domain may be advantageous in providing higher order interactions (i.e. bivalent or bispecific binding) with other molecules. Due to the structural homology, Fc fusion proteins exhibit in vivo pharmacokinetic profile comparable to that of human IgG with a similar isotype.

[0157] The term “Fc” refers to molecule or sequence comprising the sequence of a non-antigen-binding fragment of whole antibody, whether in monomeric or multimeric form. The original immunoglobulin source of the native Fc is preferably of human origin and may be any of the immunoglobulins, although IgG1 and IgG2 are preferred. Native Fc's are made up of monomeric polypeptides that may be linked into dimeric or multimeric forms by covalent (i.e., disulfide bonds) and non-covalent association. The number of intermolecular disulfide bonds between monomeric subunits of native Fc molecules ranges from 1 to 4 depending on class (e.g., IgG, IgA, IgE) or subclass (e.g., IgG1, IgG2, IgG3, IgA1, IgGA2). One example of a native Fc is a disulfide-bonded dimer resulting from papain digestion of an IgG (see Ellison et al. (1982), Nucleic Acids Res. 10: 4071-9). The term “native Fc” as used herein is generic to the monomeric, dimeric, and multimeric forms. Fc domains containing binding sites for Protein A, Protein G, various Fc receptors and complement proteins.

[0158] In various embodiments, the term “Fc variant” refers to a molecule or sequence that is modified from a native Fc but still comprises a binding site for the salvage receptor, FcRn. International applications WO 97/34631 (published Sep. 25, 1997) and WO 96/32478 describe exemplary Fc variants, as well as interaction with the salvage receptor, and are hereby incorporated by reference. Furthermore, a native Fc comprises sites that may be removed because they provide structural features or biological activity that are not required for the fusion molecules of the present invention. Thus, in various embodiments, the term “Fc variant” comprises a molecule or sequence that lacks one or more native Fc sites or residues that affect or are involved in (1) disulfide bond formation, (2) incompatibility with a selected host cell (3) N-terminal heterogeneity upon expression in a selected host cell, (4) glycosylation, (5) interaction with complement, (6) binding to an Fc receptor other than a salvage receptor, or (7) antibody-dependent cellular cytotoxicity (ADCC).

[0159] The term “Fc domain” encompasses native Fc and Fc variant molecules and sequences as defined above. As with Fc variants and native Fc's, the term “Fc domain” includes molecules in monomeric or multimeric form, whether digested from whole antibody or produced by recombinant gene expression or by other means. In various embodiments, an “Fc domain” refers to a dimer of two Fc domain monomers (SEQ ID NO: 44) that generally includes full or part of the hinge region. In various embodiments, an Fc domain may be mutated to lack effector functions. In various embodiments, each of the Fc domain monomers in an Fc domain includes amino acid substitutions in the CH2 antibody constant domain to reduce the interaction or binding between the Fc domain and an Fcγ receptor. In various embodiments, each subunit of the Fc domain comprises three amino acid substitutions that reduce binding to an activating Fc receptor and/or effector function wherein said amino acid substitutions are L234A, L235A and G237A (SEQ ID NO: 45).

[0160] In various embodiments, each of the two Fc domain monomers in an Fc domain includes amino acid substitutions that promote the heterodimerization of the two monomers. In various other embodiments, heterodimerization of Fc domain monomers can be promoted by introducing different, but compatible, substitutions in the two Fc domain monomers, such as “knob-into-hole” residue pairs. The “knob-into-hole” technique is also disclosed in U.S. Pat. No. 8,216,805. In yet another embodiment, one Fc domain monomer includes the knob mutation T366W and the other Fc domain monomer includes hole mutations T366S, L358A, and Y407V. In various embodiments, two Cys residues were introduced (S354C on one chain and Y349C on the matching chain) that form a stabilizing disulfide bridge (SEQ ID NOS: 46 and 47). The use of heterodimeric Fc may result in monovalent IL-2 variant.

[0161] In various embodiments, the Fc domain sequence used to make IL-2 variants is the human IgG1-Fc domain sequence set forth in SEQ ID NO: 45:

(SEQ ID NO: 45)
DKTHTCPPCPAPEAAGAPSVFLFPPKPKDTLMISRTPEVTCVVVDVSHE
DPEVKFNWYVDGVEVHNAKTKPREEQYNSTYRVVSVLTVLHQDWLNGKE
YKCKVSNKALPAPIEKTISKAKGQPREPQVYTLPPSRDELTKNQVSLTC
LVKGFYPSDIAVEWESNGQPENNYKTTPPVLDSDGSFFLYSKLTVDKSR
WQQGNVFSCSVMHEALHNHYTQKSLSLSPG

wherein SEQ ID NO: 45 contains amino acid substitutions (underlined) that ablate FcγR and C1q binding.

[0162] In various embodiments, the heterodimeric Fc domain sequence used to make IL-2 variants is the Knob-Fc domain sequence set forth in SEQ ID NO: 46

(SEQ ID NO: 46)
DKTHTCPPCPAPEAAGAPSVFLFPPKPKDTLMISRTPEVTCVVVDVSHE
DPEVKFNWYVDGVEVHNAKTKPREEQYNSTYRVVSVLTVLHQDWLNGKE
YKCKVSNKALPAPIEKTISKAKGQPREPQVCTLPPSREEMTKNQVSLWC
LVKGFYPSDIAVEWESNGQPENNYKTTPPVLDSDGSFFLYSKLTVDKSR
WQQGNVFSCSVMHEALHNHYTQKSLSLSPG

wherein SEQ ID NO: 46 contains amino acid substitutions (underlined) that ablate FcγR and C1q binding.

[0163] In various embodiments, the heterodimeric Fc domain sequence used to make IL-2 variants is the Hole-Fc domain sequence set forth in SEQ ID NO: 47

(SEQ ID NO: 47)
DKTHTCPPCPAPEAAGAPSVFLFPPKPKDTLMISRTPEVTCVVVDVSHE
DPEVKFNWYVDGVEVHNAKTKPREEQYNSTYRVVSVLTVLHQDWLNGKE
YKCKVSNKALPAPIEKTISKAKGQPREPQVYTLPPCREEMTKNQVSLSC
AVKGFYPSDIAVEWESNGQPENNYKTTPPVLDSDGSFFLVSKLTVDKSR
WQQGNVFSCSVMHEALHNHYTQKSLSLSPG

wherein SEQ ID NO: 47 contains amino acid substitutions (underlined and in bold) that ablate FcγR and C1q binding.

[0164] In various embodiments, the Fc domain sequence used to make IL-2 variants is the IgG1-Fc domain with extended half-life and reduced/abolished effector function set forth in SEQ ID NO: 251

(SEQ ID NO: 251)
DKTHTCPPCPAPEAAGGPSVFLFPPKPKDTLYITREPEVTCVVVDVSHE
DPEVKFNWYVDGVEVHNAKTKPREEQYNSTYRVVSVLTVLHQDWLNGKE
YKCKVSNKALPAPIEKTISKAKGQPREPQVYTLPPSRDELTKNQVSLTC
LVKGFYPSDIAVEWESNGQPENNYKTTPPVLDSDGSFFLYSKLTVDKSR
WQQGNVFSCSVMHEALHNHYTQKSLSLSPG

wherein SEQ ID NO: 251 contains amino acid substitutions (underlined) that ablate FcγR and C1q binding and substitutions (bold) that extend fusion protein serum half-life.

[0165] In various embodiments, the Fc domain sequence used to make IL-2 variants is the IgG1-Fc domain with reduced/abolished effector function and extended half-life and having the amino acid sequence set forth in SEQ ID NO: 252

(SEQ ID NO: 252)
DKTHTCPPCPAPEAAGAPSVFLFPPKPKDTLMISRTPEVTCVVVDVSHE
DPEVKFNWYVDGVEVHNAKTKPREEQYNSTYRVVSVLTVLHQDWLNGKE
YKCKVSNKALPAPIEKTISKAKGQPREPQVYTLPPSRDELTKNQVSLTC
LVKGFYPSDIAVEWESNGQPENNYKTTPPVLDSDGSFFLYSKLTVDKSR
WQQGNVFSCSVMHEALHAHYTQKSLSLSPG

wherein SEQ ID NO: 252 contains amino acid substitutions (underlined) that ablate FcγR and C1q binding and substitutions (bold) that extend fusion protein serum half-life.

### Linkers

[0166] In various embodiments, the heterologous protein is attached to the IL-2 variant by a linker and/or a hinge linker peptide. The linker or hinge linker may be an artificial sequence of between 5, 10, 15, 20, 30, 40 or more amino acids that are relatively free of secondary structure or display α-helical conformation.

[0167] Peptide linker provides covalent linkage and additional structural and/or spatial flexibility between protein domains. As known in the art, peptide linkers contain flexible amino acid residues, such as glycine and serine. In various embodiments, peptide linker may include 1-100 amino acids. In various embodiments, a spacer can contain motif of GGGSGGGS (SEQ ID NO: 55). In other embodiments, a linker can contain motif of GGGGS (SEQ ID NO: 58)n, wherein n is an integer from 1 to 10. In other embodiments, a linker can also contain amino acids other than glycine and serine. In another embodiment, a linker can contain other protein motifs, including but not limited to, sequences of α-helical conformation such as AEAAAKEAAAKEAAAKA (SEQ ID NO: 53). In various embodiments, linker length and composition can be tuned to optimize activity or developability, including but not limited to, expression level and aggregation propensity. In another embodiment, the peptide linker can be a simple chemical bond, e.g., an amide bond (e.g., by chemical conjugation of PEG).

[0168] Exemplary peptide linkers are provided in Table 5:

TABLE 5

| Linker sequence | SEQ ID NO: |
|---|---|
| GGGSGGGSGGGS | 48 |
| GGGS | 49 |
| GSSGGSGGSGGSG | 50 |
| GSSGT | 51 |
| GGGGSGGGGSGGGS | 52 |
| AEAAAKEAAAKEAAAKA | 53 |
| GGGGSGGGGSGGGGSGGGGS | 54 |
| GGGSGGGS | 55 |
| GSGST | 56 |
| GGSS | 57 |
| GGGGS | 58 |
| GGSG | 59 |
| SGGG | 60 |
| GSGS | 61 |
| GSGSGS | 62 |
| GSGSGSGS | 63 |
| GSGSGSGSGS | 64 |
| GSGSGSGSGSGS | 65 |
| GGGGSGGGGS | 66 |
| GGGGSGGGGSGGGGS | 67 |

### Polynucleotides

[0169] In another aspect, the present disclosure provides isolated nucleic acid molecules comprising a polynucleotide encoding IL-2, an IL-2 variant, an IL-2 fusion protein, or an IL-2 variant fusion protein of the present disclosure. The subject nucleic acids may be single-stranded or double stranded. Such nucleic acids may be DNA or RNA molecules. DNA includes, for example, cDNA, genomic DNA, synthetic DNA, DNA amplified by PCR, and combinations thereof. Genomic DNA encoding IL-2 polypeptides is obtained from genomic libraries which are available for a number of species. Synthetic DNA is available from chemical synthesis of overlapping oligonucleotide fragments followed by assembly of the fragments to reconstitute part or all of the coding regions and flanking sequences. RNA may be obtained from prokaryotic expression vectors which direct high-level synthesis of mRNA, such as vectors using T7 promoters and RNA polymerase. cDNA is obtained from libraries prepared from mRNA isolated from various tissues that express IL-2. The DNA molecules of the disclosure include full-length genes as well as polynucleotides and fragments thereof. The full-length gene may also include sequences encoding the N-terminal signal sequence. Such nucleic acids may be used, for example, in methods for making the novel IL-2 variants.

[0170] In various embodiments, the isolated nucleic acid molecules comprise the polynucleotides described herein, and further comprise a polynucleotide encoding at least one heterologous protein described herein. In various embodiments, the nucleic acid molecules further comprise polynucleotides encoding the linkers or hinge linkers described herein.

[0171] In various embodiments, the recombinant nucleic acids of the present disclosure may be operably linked to one or more regulatory nucleotide sequences in an expression construct. Regulatory sequences are art-recognized and are selected to direct expression of the IL-2 variant. Accordingly, the term regulatory sequence includes promoters, enhancers, and other expression control elements. Exemplary regulatory sequences are described in Goeddel; Gene Expression Technology: Methods in Enzymology, Academic Press, San Diego, Calif. (1990). Typically, said one or more regulatory nucleotide sequences may include, but are not limited to, promoter sequences, leader or signal sequences, ribosomal binding sites, transcriptional start and termination sequences, translational start and termination sequences, and enhancer or activator sequences. Constitutive or inducible promoters as known in the art are contemplated by the present disclosure. The promoters may be either naturally occurring promoters, or hybrid promoters that combine elements of more than one promoter. An expression construct may be present in a cell on an episome, such as a plasmid, or the expression construct may be inserted in a chromosome. In various embodiments, the expression vector contains a selectable marker gene to allow the selection of transformed host cells. Selectable marker genes are well known in the art and will vary with the host cell used.

[0172] In another aspect of the present disclosure, the subject nucleic acid is provided in an expression vector comprising a nucleotide sequence encoding an IL-2 variant and operably linked to at least one regulatory sequence. The term “expression vector” refers to a plasmid, phage, virus or vector for expressing a polypeptide from a polynucleotide sequence. Vectors suitable for expression in host cells are readily available and the nucleic acid molecules are inserted into the vectors using standard recombinant DNA techniques. Such vectors can include a wide variety of expression control sequences that control the expression of a DNA sequence when operatively linked to it may be used in these vectors to express DNA sequences encoding an IL-2 variant. Such useful expression control sequences, include, for example, the early and late promoters of SV40, tet promoter, adenovirus or cytomegalovirus immediate early promoter, RSV promoters, the lac system, the trp system, the TAC or TRC system, T7 promoter whose expression is directed by T7 RNA polymerase, the major operator and promoter regions of phage lambda, the control regions for fd coat protein, the promoter for 3-phosphoglycerate kinase or other glycolytic enzymes, the promoters of acid phosphatase, e.g., PhoS, the promoters of the yeast a-mating factors, the polyhedron promoter of the baculovirus system and other sequences known to control the expression of genes of prokaryotic or eukaryotic cells or their viruses, and various combinations thereof. It should be understood that the design of the expression vector may depend on such factors as the choice of the host cell to be transformed and/or the type of protein desired to be expressed. Moreover, the vector's copy number, the ability to control that copy number and the expression of any other protein encoded by the vector, such as antibiotic markers, should also be considered. An exemplary expression vector suitable for expression of vIL-2 is the pDSRa, (described in WO 90/14363, herein incorporated by reference) and its derivatives, containing vIL-2 polynucleotides, as well as any additional suitable vectors known in the art or described below.

[0173] A recombinant nucleic acid of the present disclosure can be produced by ligating the cloned gene, or a portion thereof, into a vector suitable for expression in either prokaryotic cells, eukaryotic cells (yeast, avian, insect or mammalian), or both. Expression vehicles for production of a recombinant IL-2 polypeptide include plasmids and other vectors. For instance, suitable vectors include plasmids of the types: pBR322-derived plasmids, pEMBL-derived plasmids, pEX-derived plasmids, pBTac-derived plasmids and pUC-derived plasmids for expression in prokaryotic cells, such as E. coli.

[0174] Some mammalian expression vectors contain both prokaryotic sequences to facilitate the propagation of the vector in bacteria, and one or more eukaryotic transcription units that are expressed in eukaryotic cells. The pcDNAI/amp, pcDNAI/neo, pRc/CMV, pSV2gpt, pSV2neo, pSV2-dhfr, pTk2, pRSVneo, pMSG, pSVT7, pko-neo and pHyg derived vectors are examples of mammalian expression vectors suitable for transfection of eukaryotic cells. Some of these vectors are modified with sequences from bacterial plasmids, such as pBR322, to facilitate replication and drug resistance selection in both prokaryotic and eukaryotic cells. Alternatively, derivatives of viruses such as the bovine papilloma virus (BPV-1), or Epstein-Barr virus (pHEBo, pREP-derived and p205) can be used for transient expression of proteins in eukaryotic cells. Examples of other viral (including retroviral) expression systems can be found below in the description of gene therapy delivery systems. The various methods employed in the preparation of the plasmids and in transformation of host organisms are well known in the art. For other suitable expression systems for both prokaryotic and eukaryotic cells, as well as general recombinant procedures, see Molecular Cloning A Laboratory Manual, 2nd Ed., ed. by Sambrook, Fritsch and Maniatis (Cold Spring Harbor Laboratory Press, 1989) Chapters 16 and 17. In some instances, it may be desirable to express the recombinant polypeptides by the use of a baculovirus expression system. Examples of such baculovirus expression systems include pVL-derived vectors (such as pVL1392, pVL1393 and pVL941), pAcUW-derived vectors (such as pAcUW1), and pBlueBac-derived vectors (such as the B-gal containing pBlueBac III).

[0175] In various embodiments, a vector will be designed for production of the subject IL-2 variants in CHO cells, such as a Pcmv-Script vector (Stratagene, La Jolla, Calif.), pcDNA4 vectors (Invitrogen, Carlsbad, Calif.) and pCI-neo vectors (Promega, Madison, Wis.). As will be apparent, the subject gene constructs can be used to cause expression of the subject IL-2 variants in cells propagated in culture, e.g., to produce proteins, including fusion proteins or variant proteins, for purification.

[0176] This present disclosure also pertains to a host cell transfected with a recombinant gene including a nucleotide sequence coding an amino acid sequence for one or more of the subject IL-2 variant. The host cell may be any prokaryotic or eukaryotic cell. For example, an IL-2 variant of the present disclosure may be expressed in bacterial cells such as E. coli, insect cells (e.g., using a baculovirus expression system), yeast, or mammalian cells. Other suitable host cells are known to those skilled in the art.

[0177] Accordingly, the present disclosure further pertains to methods of producing the subject IL-2 variants. For example, a host cell transfected with an expression vector encoding an IL-2 variant can be cultured under appropriate conditions to allow expression of the IL-2 variant to occur. The IL-2 variant may be secreted and isolated from a mixture of cells and medium containing the IL-2 variant. Alternatively, the IL-2 variant may be retained cytoplasmically or in a membrane fraction and the cells harvested, lysed and the protein isolated. A cell culture includes host cells, media and other byproducts. Suitable media for cell culture is well known in the art.

[0178] The polypeptides and proteins of the present disclosure can be purified according to protein purification techniques are well known to those of skill in the art. These techniques involve, at one level, the crude fractionation of the proteinaceous and nonproteinaceous fractions. Having separated the peptide polypeptides from other proteins, the peptide or polypeptide of interest can be further purified using chromatographic and electrophoretic techniques to achieve partial or complete purification (or purification to homogeneity). The term “isolated polypeptide” or “purified polypeptide” as used herein, is intended to refer to a composition, isolatable from other components, wherein the polypeptide is purified to any degree relative to its naturally-obtainable state. A purified polypeptide therefore also refers to a polypeptide that is free from the environment in which it may naturally occur. Generally, “purified” will refer to a polypeptide composition that has been subjected to fractionation to remove various other components, and which composition substantially retains its expressed biological activity. Where the term “substantially purified” is used, this designation will refer to a peptide or polypeptide composition in which the polypeptide or peptide forms the major component of the composition, such as constituting about 50%, about 60%, about 70%, about 80%, about 85%, or about 90% or more of the proteins in the composition.

[0179] Various techniques suitable for use in purification will be well known to those of skill in the art. These include, for example, precipitation with ammonium sulphate, PEG, antibodies (immunoprecipitation) and the like or by heat denaturation, followed by centrifugation; chromatography such as affinity chromatography (Protein-A columns), ion exchange, gel filtration, reverse phase, hydroxylapatite, hydrophobic interaction chromatography; isoelectric focusing; gel electrophoresis; and combinations of these techniques. As is generally known in the art, it is believed that the order of conducting the various purification steps may be changed, or that certain steps may be omitted, and still result in a suitable method for the preparation of a substantially purified polypeptide.

### Pharmaceutical Compositions

[0180] In another aspect, the present disclosure provides a pharmaceutical composition comprising the IL-2 variants, or IL-2 variant fusion proteins, in admixture with a pharmaceutically acceptable carrier. Such pharmaceutically acceptable carriers are well known and understood by those of ordinary skill and have been extensively described (see, e.g., Remington's Pharmaceutical Sciences, 18th Edition, A. R. Gennaro, ed., Mack Publishing Company, 1990). The pharmaceutically acceptable carriers may be included for purposes of modifying, maintaining or preserving, for example, the pH, osmolarity, viscosity, clarity, color, isotonicity, odor, sterility, stability, rate of dissolution or release, adsorption or penetration of the composition. Such pharmaceutical compositions may influence the physical state, stability, rate of in vivo release, and rate of in vivo clearance of the polypeptide. Suitable pharmaceutically acceptable carriers include, but are not limited to, amino acids (such as glycine, glutamine, asparagine, arginine or lysine); antimicrobials; antioxidants (such as ascorbic acid, sodium sulfite or sodium hydrogen-sulfite); buffers (such as borate, bicarbonate, Tris-HCl, citrates, phosphates, other organic acids); bulking agents (such as mannitol or glycine), chelating agents (such as ethylenediamine tetraacetic acid (EDTA)); complexing agents (such as caffeine, polyvinylpyrrolidone, beta-cyclodextrin or hydroxypropyl-beta-cyclodextrin); fillers; monosaccharides; disaccharides and other carbohydrates (such as glucose, mannose, or dextrins); proteins (such as serum albumin, gelatin or immunoglobulins); coloring; flavoring and diluting agents; emulsifying agents; hydrophilic polymers (such as polyvinylpyrrolidone); low molecular weight polypeptides; salt-forming counter ions (such as sodium); preservatives (such as benzalkonium chloride, benzoic acid, salicylic acid, thimerosal, phenethyl alcohol, methylparaben, propylparaben, chlorhexidine, sorbic acid or hydrogen peroxide); solvents (such as glycerin, propylene glycol or polyethylene glycol); sugar alcohols (such as mannitol or sorbitol); suspending agents; surfactants or wetting agents (such as pluronics, PEG, sorbitan esters, polysorbates such as polysorbate 20, polysorbate 80, triton, tromethamine, lecithin, cholesterol, tyloxapal); stability enhancing agents (sucrose or sorbitol); tonicity enhancing agents (such as alkali metal halides (preferably sodium or potassium chloride, mannitol sorbitol); delivery vehicles; diluents; excipients and/or pharmaceutical adjuvants.

[0181] The primary vehicle or carrier in a pharmaceutical composition may be either aqueous or non-aqueous in nature. For example, a suitable vehicle or carrier may be water for injection, physiological saline solution or artificial cerebrospinal fluid, possibly supplemented with other materials common in compositions for parenteral administration. Neutral buffered saline or saline mixed with serum albumin are further exemplary vehicles. Other exemplary pharmaceutical compositions comprise Tris buffer of about pH 7.0-8.5, or acetate buffer of about pH 4.0-5.5, which may further include sorbitol or a suitable substitute thereof. In one embodiment of the present disclosure, compositions may be prepared for storage by mixing the selected composition having the desired degree of purity with optional formulation agents (Remington's Pharmaceutical Sciences, supra) in the form of a lyophilized cake or an aqueous solution. Further, the therapeutic composition may be formulated as a lyophilizate using appropriate excipients such as sucrose. The optimal pharmaceutical composition will be determined by one of ordinary skill in the art depending upon, for example, the intended route of administration, delivery format, and desired dosage.

[0182] When parenteral administration is contemplated, the therapeutic pharmaceutical compositions may be in the form of a pyrogen-free, parenterally acceptable aqueous solution comprising the desired IL-2 polypeptide or IL-2 polypeptide fusion protein, in a pharmaceutically acceptable vehicle. A particularly suitable vehicle for parenteral injection is sterile distilled water in which a polypeptide is formulated as a sterile, isotonic solution, properly preserved. In various embodiments, pharmaceutical formulations suitable for injectable administration may be formulated in aqueous solutions, preferably in physiologically compatible buffers such as Hanks' solution, Ringer's solution, or physiologically buffered saline. Aqueous injection suspensions may contain substances that increase the viscosity of the suspension, such as sodium carboxymethyl cellulose, sorbitol, or dextran. Additionally, suspensions of the active compounds may be prepared as appropriate oily injection suspensions. Optionally, the suspension may also contain suitable stabilizers or agents to increase the solubility of the compounds and allow for the preparation of highly concentrated solutions.

[0183] In various embodiments, the therapeutic pharmaceutical compositions may be formulated for targeted delivery using a colloidal dispersion system. Colloidal dispersion systems include macromolecule complexes, nanocapsules, microspheres, beads, and lipid-based systems including oil-in-water emulsions, micelles, mixed micelles, and liposomes. Examples of lipids useful in liposome production include phosphatidyl compounds, such as phosphatidylglycerol, phosphatidylcholine, phosphatidylserine, phosphatidylethanolamine, sphingolipids, cerebrosides, and gangliosides. Illustrative phospholipids include egg phosphatidylcholine, dipalmitoylphosphatidylcholine, and distearoylphosphatidylcholine. The targeting of liposomes is also possible based on, for example, organ-specificity, cell-specificity, and organelle-specificity and is known in the art.

[0184] In various embodiments, oral administration of the pharmaceutical compositions is contemplated. Pharmaceutical compositions that are administered in this fashion can be formulated with or without those carriers customarily used in the compounding of solid dosage forms such as tablets and capsules. In solid dosage forms for oral administration (capsules, tablets, pills, dragees, powders, granules, and the like), one or more therapeutic compounds of the present disclosure may be mixed with one or more pharmaceutically acceptable carriers, such as sodium citrate or dicalcium phosphate, and/or any of the following: (1) fillers or extenders, such as starches, lactose, sucrose, glucose, mannitol, and/or silicic acid; (2) binders, such as, for example, carboxymethylcellulose, alginates, gelatin, polyvinyl pyrrolidone, sucrose, and/or acacia; (3) humectants, such as glycerol; (4) disintegrating agents, such as agar-agar, calcium carbonate, potato or tapioca starch, alginic acid, certain silicates, and sodium carbonate; (5) solution retarding agents, such as paraffin; (6) absorption accelerators, such as quaternary ammonium compounds; (7) wetting agents, such as, for example, cetyl alcohol and glycerol monostearate; (8) absorbents, such as kaolin and bentonite clay; (9) lubricants, such a talc, calcium stearate, magnesium stearate, solid polyethylene glycols, sodium lauryl sulfate, and mixtures thereof; and (10) coloring agents. In the case of capsules, tablets and pills, the pharmaceutical compositions may also comprise buffering agents. Solid compositions of a similar type may also be employed as fillers in soft and hard-filled gelatin capsules using such excipients as lactose or milk sugars, as well as high molecular weight polyethylene glycols and the like. Liquid dosage forms for oral administration include pharmaceutically acceptable emulsions, microemulsions, solutions, suspensions, syrups, and elixirs. In addition to the active ingredient, the liquid dosage forms may contain inert diluents commonly used in the art, such as water or other solvents, solubilizing agents and emulsifiers, such as ethyl alcohol, isopropyl alcohol, ethyl carbonate, ethyl acetate, benzyl alcohol, benzyl benzoate, propylene glycol, 1,3-butylene glycol, oils (in particular, cottonseed, groundnut, corn, germ, olive, castor, and sesame oils), glycerol, tetrahydrofuryl alcohol, polyethylene glycols and fatty acid esters of sorbitan, and mixtures thereof Besides inert diluents, the oral compositions can also include adjuvants such as wetting agents, emulsifying and suspending agents, sweetening, flavoring, coloring, perfuming, and preservative agents.

[0185] In various embodiments, topical administration of the pharmaceutical compositions, either to skin or to mucosal membranes, is contemplated. The topical formulations may further include one or more of the wide variety of agents known to be effective as skin or stratum corneum penetration enhancers. Examples of these are 2-pyrrolidone, N-methyl-2-pyrrolidone, dimethylacetamide, dimethylformamide, propylene glycol, methyl or isopropyl alcohol, dimethyl sulfoxide, and azone. Additional agents may further be included to make the formulation cosmetically acceptable. Examples of these are fats, waxes, oils, dyes, fragrances, preservatives, stabilizers, and surface active agents. Keratolytic agents such as those known in the art may also be included. Examples are salicylic acid and sulfur. Dosage forms for the topical or transdermal administration include powders, sprays, ointments, pastes, creams, lotions, gels, solutions, patches, and inhalants. The active compound may be mixed under sterile conditions with a pharmaceutically acceptable carrier, and with any preservatives, buffers, or propellants which may be required. The ointments, pastes, creams and gels may contain, in addition to a subject compound of the disclosure (e.g., a IL-2 variant), excipients, such as animal and vegetable fats, oils, waxes, paraffins, starch, tragacanth, cellulose derivatives, polyethylene glycols, silicones, bentonites, silicic acid, talc and zinc oxide, or mixtures thereof.

[0186] Additional pharmaceutical compositions contemplated for use herein include formulations involving polypeptides in sustained- or controlled-delivery formulations. Techniques for formulating a variety of other sustained- or controlled-delivery means, such as liposome carriers, bio-erodible microparticles or porous beads and depot injections, are also known to those skilled in the art.

[0187] An effective amount of a pharmaceutical composition to be employed therapeutically will depend, for example, upon the therapeutic context and objectives. One skilled in the art will appreciate that the appropriate dosage levels for treatment will thus vary depending, in part, upon the molecule delivered, the indication for which the polypeptide is being used, the route of administration, and the size (body weight, body surface or organ size) and condition (the age and general health) of the patient. Accordingly, the clinician may titer the dosage and modify the route of administration to obtain the optimal therapeutic effect. A typical dosage may range from about 0.001 mg/kg to up to about 100 mg/kg or more, depending on the factors mentioned above. Polypeptide compositions may be preferably injected or administered intravenously. Long-acting pharmaceutical compositions may be administered every three to four days, every week, or biweekly depending on the half-life and clearance rate of the particular formulation. The frequency of dosing will depend upon the pharmacokinetic parameters of the polypeptide in the formulation used. Typically, a composition is administered until a dosage is reached that achieves the desired effect. The composition may therefore be administered as a single dose, or as multiple doses (at the same or different concentrations/dosages) over time, or as a continuous infusion. Further refinement of the appropriate dosage is routinely made. Appropriate dosages may be ascertained through use of appropriate dose-response data.

[0188] The route of administration of the pharmaceutical composition is in accord with known methods, e.g. orally, through injection by intravenous, intraperitoneal, intracerebral (intra-parenchymal), intracerebroventricular, intramuscular, intra-ocular, intraarterial, intraportal, intralesional routes, intramedullary, intrathecal, intraventricular, transdermal, subcutaneous, or intraperitoneal or intratumorally; as well as intranasal, enteral, topical, sublingual, urethral, vaginal, or rectal means, by sustained release systems or by implantation devices. Where desired, the compositions may be administered by bolus injection or continuously by infusion, or by implantation device. Alternatively, or additionally, the composition may be administered locally via implantation of a membrane, sponge, or another appropriate material on to which the desired molecule has been absorbed or encapsulated. Where an implantation device is used, the device may be implanted into any suitable tissue or organ, and delivery of the desired molecule may be via diffusion, timed-release bolus, or continuous administration.

### Therapeutic Uses

[0189] The present disclosure provides for a method of treating an autoimmune disease in a subject, comprising administering to said subject a therapeutically effective amount (either as monotherapy or in a combination therapy regimen) of an IL-2 variant, or IL-2 variant fusion protein, of the present disclosure in pharmaceutically acceptable carrier. An autoimmune disease, as pertains to the present invention, is a disease or disorder arising from and directed against an individual's own tissues or a co-segregate or manifestation thereof or resulting condition therefrom. In various embodiments, the autoimmune disease includes, but is not limited to, arthritis (including rheumatoid arthritis, reactive arthritis), systemic lupus erythematosus (SLE), psoriasis and inflammatory bowel disease (IBD), encephalomyelitis, uveitis, myasthenia gravis, multiple sclerosis, insulin dependent diabetes, Addison's disease, celiac disease, chronic fatigue syndrome, autoimmune hepatitis, autoimmune alopecia, ankylosing spondylitis, ulcerative colitis, Crohn's disease, fibromyalgia, pemphigus vulgaris, Sjogren's syndrome, Kawasaki's Disease, hyperthyroidism/Graves disease, hypothyroidism/Hashimoto's disease, endometriosis, scleroderma, pernicious anemia, Goodpasture syndrome, Guillain-Barre syndrome, Wegener's disease, glomerulonephritis, aplastic anemia (including multiply transfused aplastic anemia patients), paroxysmal nocturnal hemoglobinuria, myelodysplastic syndrome, idiopathic thrombocytopenic purpura, autoimmune hemolytic anemia, Evan's syndrome, Factor VIII inhibitor syndrome, systemic vasculitis, dermatomyositis, polymyositis and rheumatic fever, autoimmune lymphoproliferative syndrome (ALPS), autoimmune bullous pemphigoid, Parkinson's disease, sarcoidosis, vitiligo, primary biliary cirrhosis, and autoimmune myocarditis.

[0190] In another aspect, the present disclosure provides for a method of treating an inflammatory disease in a subject, comprising administering to said subject a therapeutically effective amount (either as monotherapy or in a combination therapy regimen) of an IL-2 variant, or IL-2 variant fusion protein, of the present disclosure in pharmaceutically acceptable carrier. “Inflammatory diseases” include all diseases associated with acute or various inflammation. Acute inflammation is the initial response of the body to harmful stimuli and results from an increased movement of plasma and leukocytes (such as e.g. granulocytes) from the blood into the injured tissues. A number of biochemical events propagates and matures the inflammatory response, involving the local vascular system, the immune system, and various cells within the injured tissue. Prolonged inflammation is referred to as various inflammation, which leads to a progressive shift in the type of cells present at the site of inflammation and is characterized by simultaneous destruction and healing of the tissue from the inflammatory process. In another aspect, the present disclosure provides a method for treating an inflammatory disease in a subject, comprising administering a therapeutically effective amount of the pharmaceutical compositions of the invention to a subject in need thereof. In one embodiment, the subject is a human subject. In various embodiments, the inflammatory disease to be treated includes, but is not limited to, Crohn's disease, colitis, dermatitis, psoriasis, diverticulitis, hepatitis, irritable bowel syndrome (IBS), lupus erythematous, nephritis, Parkinson's disease, ulcerative colitis, collagenous colitis, lymphocytic colitis, ischemic colitis, diversion colitis, Behcet's syndrome and indeterminate colitis multiple sclerosis (MS), Alzheimer's disease, arthritis, rheumatoid arthritis, asthma, and various cardiovascular diseases such as atherosclerosis and vasculitis. In various embodiments, the inflammatory disease is selected from the group consisting of rheumatoid arthritis, diabetes, gout, cryopyrin-associated periodic syndrome, and chronic obstructive pulmonary disorder.

[0191] In another aspect, the present disclosure provides methods for organ transplantation or associated graft-versus-host disease in a subject, comprising administering a therapeutically effective amount of the pharmaceutical compositions of the invention to a subject in need thereof. In one embodiment, the subject is a human subject. In various embodiments, the transplantation is selected from organ transplantations of the heart, kidneys, liver, lungs, pancreas, intestine and thymus or from tissues transplantations of the bones, tendons, cornea, skin, heart valves, nerves and veins. As used herein, the term “graft vs. host disease” or “GVHD” refers to a condition, including acute and chronic, resulting from transplanted (graft) cell effects on host cells and tissues resulting from GVH. In other words, donor immune cells infused within the graft or donor immune cells that develop from the stem cells, may see the patient's (host) cells as foreign and turn against them with an immune response. Acute graft-versus-host disease (GVHD) is specifically a disorder caused by donor immune cells in patients who have had an allogeneic marrow or blood cell transplantation. The most commonly affected tissues are skin intestine and liver. In severe cases, GVHD can cause blistering in the skin or excessive diarrhea and wasting. Prednisone and/or other immunosuppressive medications are used to treat acute graft-versus-host disease.

[0192] In another aspect, the present disclosure provides for a method of treating cancer cells in a subject, comprising administering to said subject a therapeutically effective amount (either as monotherapy or in a combination therapy regimen) of an IL-2 variant, or IL-2 variant fusion proteins, of the present disclosure in pharmaceutically acceptable carrier, wherein such administration inhibits the growth and/or proliferation of a cancer cell. Specifically, an IL-2 variant, or IL-2 variant fusion protein, of the present disclosure is useful in treating disorders characterized as cancer. Such disorders include, but are not limited to solid tumors, such as cancers of the breast, respiratory tract, brain, reproductive organs, digestive tract, urinary tract, eye, liver, skin, head and neck, thyroid, parathyroid and their distant metastases, lymphomas, sarcomas, multiple myeloma and leukemia. Examples of breast cancer include, but are not limited to invasive ductal carcinoma, invasive lobular carcinoma, ductal carcinoma in situ, and lobular carcinoma in situ. Examples of cancers of the respiratory tract include, but are not limited to, small-cell and non-small-cell lung carcinoma, as well as bronchial adenoma and pleuropulmonary blastoma. Examples of brain cancers include, but are not limited to, brain stem and hypophthalmic glioma, cerebellar and cerebral astrocytoma, medulloblastoma, ependymoma, as well as neuroectodermal and pineal tumor. Tumors of the male reproductive organs include, but are not limited to, prostate and testicular cancer. Tumors of the female reproductive organs include, but are not limited to endometrial, cervical, ovarian, vaginal, and vulvar cancer, as well as sarcoma of the uterus. Tumors of the digestive tract include, but are not limited to anal, colon, colorectal, esophageal, gallbladder, gastric, pancreatic, rectal, small-intestine, and salivary gland cancers. Tumors of the urinary tract include, but are not limited to, bladder, penile, kidney, renal pelvis, ureter, and urethral cancers. Eye cancers include, but are not limited to, intraocular melanoma and retinoblastoma. Examples of liver cancers include, but are not limited to, hepatocellular carcinoma (liver cell carcinomas with or without fibrolamellar variant), cholangiocarcinoma (intrahepatic bile duct carcinoma), and mixed hepatocellular cholangiocarcinoma. Skin cancers include, but are not limited to squamous cell carcinoma, Kaposi's sarcoma, malignant melanoma, Merkel cell skin cancer, and non-melanoma skin cancer. Head-and-neck cancers include, but are not limited to nasopharyngeal cancer, and lip and oral cavity cancer. Lymphomas include, but are not limited to AIDS-related lymphoma, non-Hodgkin's lymphoma, cutaneous T-cell lymphoma, Hodgkin's disease, and lymphoma of the central nervous system. Sarcomas include, but are not limited to, sarcoma of the soft tissue, osteosarcoma, malignant fibrous histiocytoma, lymphosarcoma, and rhabdomyosarcoma. Leukemias include, but are not limited to acute myeloid leukemia, acute lymphoblastic leukemia, various lymphocytic leukemia, various myelogenous leukemia, and hairy cell leukemia. In various embodiments, the cancer will be a cancer with high expression of TGF-β family member, such as activin A, myostatin, TGF-β and GDF15, e.g., pancreatic cancer, gastric cancer, ovarian cancer, colorectal cancer, melanoma leukemia, lung cancer, prostate cancer, brain cancer, bladder cancer, and head-neck cancer.

[0193] Therapeutically effective amount” or “therapeutically effective dose” refers to that amount of the therapeutic agent being administered which will relieve to some extent one or more of the symptoms of the disorder being treated.

[0194] A therapeutically effective dose can be estimated initially from cell culture assays by determining an EC₅₀. A dose can then be formulated in animal models to achieve a circulating plasma concentration range that includes the EC₅₀ as determined in cell culture. Such information can be used to more accurately determine useful doses in humans. Levels in plasma may be measured, for example, by HPLC. The exact composition, route of administration and dosage can be chosen by the individual physician in view of the subject's condition.

[0195] Dosage regimens can be adjusted to provide the optimum desired response (e.g., a therapeutic or prophylactic response). For example, a single bolus can be administered, several divided doses (multiple or repeat or maintenance) can be administered over time and the dose can be proportionally reduced or increased as indicated by the exigencies of the therapeutic situation. It is especially advantageous to formulate parenteral compositions in dosage unit form for ease of administration and uniformity of dosage. Dosage unit form as used herein refers to physically discrete units suited as unitary dosages for the mammalian subjects to be treated; each unit containing a predetermined quantity of active compound calculated to produce the desired therapeutic effect in association with the required pharmaceutical carrier. The specification for the dosage unit forms of the present disclosure will be dictated primarily by the unique characteristics of the antibody and the particular therapeutic or prophylactic effect to be achieved.

[0196] Thus, the skilled artisan would appreciate, based upon the disclosure provided herein, that the dose and dosing regimen is adjusted in accordance with methods well-known in the therapeutic arts. That is, the maximum tolerable dose can be readily established, and the effective amount providing a detectable therapeutic benefit to a subject may also be determined, as can the temporal requirements for administering each agent to provide a detectable therapeutic benefit to the subject. Accordingly, while certain dose and administration regimens are exemplified herein, these examples in no way limit the dose and administration regimen that may be provided to a subject in practicing the present disclosure.

[0197] It is to be noted that dosage values may vary with the type and severity of the condition to be alleviated and may include single or multiple doses. It is to be further understood that for any particular subject, specific dosage regimens should be adjusted over time according to the individual need and the professional judgment of the person administering or supervising the administration of the compositions, and that dosage ranges set forth herein are exemplary only and are not intended to limit the scope or practice of the claimed composition. Further, the dosage regimen with the compositions of this disclosure may be based on a variety of factors, including the type of disease, the age, weight, sex, medical condition of the subject, the severity of the condition, the route of administration, and the particular antibody employed. Thus, the dosage regimen can vary widely, but can be determined routinely using standard methods. For example, doses may be adjusted based on pharmacokinetic or pharmacodynamic parameters, which may include clinical effects such as toxic effects and/or laboratory values. Thus, the present disclosure encompasses intra-subject dose-escalation as determined by the skilled artisan. Determining appropriate dosages and regimens are well-known in the relevant art and would be understood to be encompassed by the skilled artisan once provided the teachings disclosed herein.

[0198] An exemplary, non-limiting daily dosing range for a therapeutically or prophylactically effective amount of an IL-2 variant, or IL-2 variant fusion protein, of the disclosure can be 0.001 to 100 mg/kg, 0.001 to 90 mg/kg, 0.001 to 80 mg/kg, 0.001 to 70 mg/kg, 0.001 to 60 mg/kg, 0.001 to 50 mg/kg, 0.001 to 40 mg/kg, 0.001 to 30 mg/kg, 0.001 to 20 mg/kg, 0.001 to 10 mg/kg, 0.001 to 5 mg/kg, 0.001 to 4 mg/kg, 0.001 to 3 mg/kg, 0.001 to 2 mg/kg, 0.001 to 1 mg/kg, 0.010 to 50 mg/kg, 0.010 to 40 mg/kg, 0.010 to 30 mg/kg, 0.010 to 20 mg/kg, 0.010 to 10 mg/kg, 0.010 to 5 mg/kg, 0.010 to 4 mg/kg, 0.010 to 3 mg/kg, 0.010 to 2 mg/kg, 0.010 to 1 mg/kg, 0.1 to 50 mg/kg, 0.1 to 40 mg/kg, 0.1 to 30 mg/kg, 0.1 to 20 mg/kg, 0.1 to 10 mg/kg, 0.1 to 5 mg/kg, 0.1 to 4 mg/kg, 0.1 to 3 mg/kg, 0.1 to 2 mg/kg, 0.1 to 1 mg/kg, 1 to 50 mg/kg, 1 to 40 mg/kg, 1 to 30 mg/kg, 1 to 20 mg/kg, 1 to 10 mg/kg, 1 to 5 mg/kg, 1 to 4 mg/kg, 1 to 3 mg/kg, 1 to 2 mg/kg, or 1 to 1 mg/kg body weight. It is to be noted that dosage values may vary with the type and severity of the conditions to be alleviated. It is to be further understood that for any particular subject, specific dosage regimens should be adjusted over time according to the individual need and the professional judgment of the person administering or supervising the administration of the compositions, and that dosage ranges set forth herein are exemplary only and are not intended to limit the scope or practice of the claimed composition.

[0199] Toxicity and therapeutic index of the pharmaceutical compositions of the disclosure can be determined by standard pharmaceutical procedures in cell cultures or experimental animals, e.g., for determining the LD₅₀ (the dose lethal to 50% of the population) and the ED₅₀ (the dose therapeutically effective in 50% of the population). The dose ratio between toxic and therapeutic effective dose is the therapeutic index and it can be expressed as the ratio LD₅₀/ED₅₀. Compositions that exhibit large therapeutic indices are generally preferred.

[0200] The dosing frequency of the administration of the IL-2 variant, or IL-2 variant fusion protein pharmaceutical composition depends on the nature of the therapy and the particular disease being treated. The subject can be treated at regular intervals, such as twice weekly, weekly or monthly, until a desired therapeutic result is achieved. Exemplary dosing frequencies include but are not limited to: once weekly without break; once every 2 weeks; once every 3 weeks; weakly without break for 2 weeks, then monthly; weakly without break for 3 weeks, then monthly; monthly; once every other month; once every three months; once every four months; once every five months; or once every six months, or yearly.

### Combination Therapy

[0201] As used herein, the terms “co-administration”, “co-administered” and “in combination with”, referring to the a IL-2 variant, or IL-2 variant fusion protein, of the disclosure and one or more other therapeutic agents, is intended to mean, and does refer to and include the following: simultaneous administration of such combination of a IL-2 variant, or IL-2 variant fusion protein, of the disclosure and therapeutic agent(s) to a subject in need of treatment, when such components are formulated together into a single dosage form which releases said components at substantially the same time to said subject; substantially simultaneous administration of such combination of a IL-2 variant, or IL-2 variant fusion protein, of the disclosure and therapeutic agent(s) to a subject in need of treatment, when such components are formulated apart from each other into separate dosage forms which are taken at substantially the same time by said subject, whereupon said components are released at substantially the same time to said subject; sequential administration of such combination of a IL-2 variant, or IL-2 variant fusion protein, of the disclosure and therapeutic agent(s) to a subject in need of treatment, when such components are formulated apart from each other into separate dosage forms which are taken at consecutive times by said subject with a significant time interval between each administration, whereupon said components are released at substantially different times to said subject; and sequential administration of such combination of a IL-2 variant, or IL-2 variant fusion protein, of the disclosure and therapeutic agent(s) to a subject in need of treatment, when such components are formulated together into a single dosage form which releases said components in a controlled manner whereupon they are concurrently, consecutively, and/or overlappingly released at the same and/or different times to said subject, where each part may be administered by either the same or a different route.

[0202] In another aspect, the present disclosure provides a method for treating an autoimmune disease in a subject, comprising administering a therapeutically effective amount of the pharmaceutical compositions of the invention in combination with a second therapeutic agent capable of treating an autoimmune disease. In various embodiments, the second therapeutic agent is selected from the group consisting of: immunosuppressants such as corticosteroids, cyclosporin, cyclophosphamide, prednisone, azathioprine, methotrexate, rapamycin, tacrolimus, biological agents such as TNF-alpha blockers or antagonists, immunosuppressive agents (e.g., antibodies against other lymphocyte surface markers (e.g., CD40, alpha-4 integrin) or against cytokines), other fusion proteins (e.g., CTLA-4-Ig (ORENCIA®), TNFR-Ig (ENBREL®)), TNF-alpha blockers such as ENBREL®, REMICADE®, CIMZIA® and HUMIRA®, cyclophosphamide (CTX) (i.e. ENDOXAN®, CYTOXAN®, NEOSAR®, PROCYTOX®, REVIMMUNE®), methotrexate (MTX) (i.e. RHEUMATREX®, TREXALL®), belimumab (i.e. BENLYSTA®), or other immunosuppressive drugs (e.g., cyclosporin A, FK506-like compounds, rapamycin compounds, or steroids), anti-proliferatives, cytotoxic agents, or other compounds that may assist in immunosuppression. or any other biological agent targeting any inflammatory cytokine, nonsteroidal anti-inflammatory drugs/Cox-2 inhibitors, hydroxychloroquine, sulphasalazopryine, gold salts, etanercept, infliximab, mycophenolate mofetil, basiliximab, atacicept, rituximab, cytoxan, interferon beta-1a, interferon beta-1b, glatiramer acetate, mitoxantrone hydrochloride, anakinra and/or other biologics and/or intravenous immunoglobulin (IVIG). Non-limiting examples of such known therapeutics include interferons, such as IFN-beta-1a (REBIF®, AVONEX® and CINNOVEX®) and IFN-beta-1b (BETASERON®, EXTAVIA®, BETAFERON®, ZIFERON®); glatiramer acetate (COPAXONE®), a polypeptide; natalizumab (TYSABRI®); and mitoxantrone (NOVANTRONE®), a cytotoxic agent.

[0203] In another aspect, the present disclosure provides a method for treating an inflammatory disease in a subject, comprising administering a therapeutically effective amount of the pharmaceutical compositions of the invention in combination with a second therapeutic agent capable of inhibiting or reducing differentiation of Th1, Th17, Th22, and/or other cells that secrete, or cause other cells to secrete, inflammatory molecules, including, but not limited to, IL-1beta, TNF-alpha, TGF-beta, IFN-gamma, IL-17, IL-6, IL-23, IL-22, IL-21, and MMPs; inhibiting or reducing activity of Th1, Th 17, Th22, and/or other cells that secrete, or cause other cells to secrete, inflammatory molecules, including, but not limited to, IL-1beta, TNF-alpha, TGF-beta, IFN-gamma, IL-17, IL-6, IL-23, IL-22, IL-21, and MMPs; inhibiting or reducing the Th1 and/or Th17 pathways; inhibiting or reducing cytokine production and/or secretion by Th1, Th17, Th22, and/or other cells that secrete, or cause other cells to secrete, inflammatory molecules, including, but not limited to, IL-1beta, TNF-alpha, TGF-beta, IFN-gamma, IL-17, IL-6 IL-23, IL-22, IL-21, and MMPs; inhibiting or reducing proliferation of Th1, Th17, Th22, and/or other cells that secrete, or cause other cells to secrete, inflammatory molecules, including, but not limited to, IL-1beta, TNF-alpha, TGF-beta, IFN-gamma, IL-17, IL-6, IL-23, IL-22, IL-21, and MMPs. In various embodiments the second therapeutic agent is a non-steroidal anti-inflammatory agents including, without limitation, oxicams, such as piroxicam, isoxicam, tenoxicam, sudoxicam; salicylates, such as aspirin, disalcid, benorylate, trilisate, safapryn, solprin, diflunisal, and fendosal; acetic acid derivatives, such as diclofenac, fenclofenac, indomethacin, sulindac, tolmetin, isoxepac, furofenac, tiopinac, zidometacin, acematacin, fentiazac, zomepirac, clmdanac, oxepinac, felbmac, and ketorolac; fenamates, such as mefenamic, meclofenamic, flufenamic, niflumic, and tolfenamic acids; propionic acid derivatives, such as ibuprofen, naproxen, benoxaprofen, flurbiprofen, ketoprofen, fenoprofen, fenbufen, indopropfen, pirprofen, carprofen, oxaprozin, pranoprofen, miroprofen, tioxaprofen, suprofen, alminoprofen, and tiaprofenic; pyrazoles, such as phenylbutazone, oxyphenbutazone, feprazone, azapropazone, and trimethazone. Mixtures of these non-steroidal anti-inflammatory agents may also be employed. In various embodiments the second therapeutic agent is a steroidal anti-inflammatory drugs including, without limitation, corticosteroids such as hydrocortisone, hydroxyl-triamcinolone, alpha-methyl dexamethasone, dexamethasone-phosphate, beclomethasone dipropionates, clobetasol valerate, desonide, desoxymethasone, desoxycorticosterone acetate, dexamethasone, dichlorisone, diflorasone diacetate, diflucortolone valerate, fluadrenolone, fluclorolone acetonide, fludrocortisone, flumethasone pivalate, fiuosinolone acetonide, fluocinonide, flucortine butylesters, fluocortolone, fluprednidene (fluprednylidene) acetate, flurandrenolone, halcinonide, hydrocortisone acetate, hydrocortisone butyrate, methylprednisolone, triamcinolone acetonide, cortisone, cortodoxone, flucetonide, fludrocortisone, difluorosone diacetate, fluradrenolone, fludrocortisone, diflurosone diacetate, fluradrenolone acetonide, medrysone, amcinafel, amcinafide, betamethasone and the balance of its esters, chloroprednisone, chlorprednisone acetate, clocortelone, clescinolone, dichlorisone, diflurprednate, flucloronide, flunisolide, fluoromethalone, fluperolone, fluprednisolone, hydrocortisone valerate, hydrocortisone cyclopentylpropionate, hydrocortamate, meprednisone, paramethasone, prednisolones prednisone, beclomethasone dipropionate, triamcinolone, and mixtures thereof.

[0204] In another aspect, the present disclosure provides a method for treating cancer or cancer metastasis in a subject, comprising administering a therapeutically effective amount of the pharmaceutical compositions of the invention in combination with a second therapy, including, but not limited to immunotherapy, cytotoxic chemotherapy, small molecule kinase inhibitor targeted therapy, surgery, radiation therapy, and stem cell transplantation. For example, such methods can be used in prophylactic cancer prevention, prevention of cancer recurrence and metastases after surgery, and as an adjuvant of other conventional cancer therapy. The present disclosure recognizes that the effectiveness of conventional cancer therapies (e.g., chemotherapy, radiation therapy, phototherapy, immunotherapy, and surgery) can be enhanced through the use of the combination methods described herein.

[0205] A wide array of conventional compounds has been shown to have anti-neoplastic activities. These compounds have been used as pharmaceutical agents in chemotherapy to shrink solid tumors, prevent metastases and further growth, or decrease the number of malignant T-cells in leukemic or bone marrow malignancies. Although chemotherapy has been effective in treating various types of malignancies, many anti-neoplastic compounds induce undesirable side effects. It has been shown that when two or more different treatments are combined, the treatments may work synergistically and allow reduction of dosage of each of the treatments, thereby reducing the detrimental side effects exerted by each compound at higher dosages. In other instances, malignancies that are refractory to a treatment may respond to a combination therapy of two or more different treatments.

[0206] In various embodiments, a second anti-cancer agent, such as a chemotherapeutic agent, will be administered to the patient. The list of exemplary chemotherapeutic agent includes, but is not limited to, daunorubicin, dactinomycin, doxorubicin, bleomycin, mitomycin, nitrogen mustard, chlorambucil, melphalan, cyclophosphamide, 6-mercaptopurine, 6-thioguanine, bendamustine, cytarabine (CA), 5-fluorouracil (5-FU), floxuridine (5-FUdR), methotrexate (MTX), colchicine, vincristine, vinblastine, etoposide, teniposide, cisplatin, carboplatin, oxaliplatin, pentostatin, cladribine, cytarabine, gemcitabine, pralatrexate, mitoxantrone, diethylstilbestrol (DES), fluradabine, ifosfamide, hydroxyureataxanes (such as paclitaxel and doxetaxel) and/or anthracycline antibiotics, as well as combinations of agents such as, but not limited to, DA-EPOCH, CHOP, CVP or FOLFOX. In various embodiments, the dosages of such chemotherapeutic agents include, but is not limited to, about any of 10 mg/m², 20 mg/m², 30 mg/m², 40 mg/m², 50 mg/m², 60 mg/m², 75 mg/m², 80 mg/m², 90 mg/m², 100 mg/m², 120 mg/m², 150 mg/m², 175 mg/m², 200 mg/m², 210 mg/m², 220 mg/m², 230 mg/m², 240 mg/m², 250 mg/m², 260 mg/m², and 300 mg/m².

[0207] In various embodiments, the combination therapy methods of the present disclosure may further comprise administering to the subject a therapeutically effective amount of immunotherapy, including, but are not limited to, treatment using depleting antibodies to specific tumor antigens; treatment using antibody-drug conjugates; treatment using agonistic, antagonistic, or blocking antibodies to co-stimulatory or co-inhibitory molecules (immune checkpoints) such as CTLA-4, PD-1, OX-40, CD137, GITR, LAGS, TIM-3, SIRP, CD47, CD40 Siglec 8, Siglec 9, Siglec 15, TIGIT and VISTA; treatment using bispecific T cell engaging antibodies (BiTE®) such as blinatumomab: treatment involving administration of biological response modifiers such as IL-12, IL-15, IL-21, GM-CSF, IFN-α, IFN-β and IFN-γ; treatment using therapeutic vaccines such as sipuleucel-T; treatment using Bacilli Calmette-Guerin (BCG); treatment using dendritic cell vaccines, or tumor antigen peptide vaccines; treatment using T-cells, chimeric antigen receptor (CAR)-T cells, or iPS-induced T-cells or iPS-induced CAR-T cells; treatment using NK cells, CAR-NK cells or iPS-induced NK cells, or iPS-induced CAR-NK cells; treatment using tumor infiltrating lymphocytes (TILs); treatment using adoptively transferred anti-tumor T cells (ex vivo expanded and/or TCR transgenic); treatment using TALL-104 cells; and treatment using immunostimulatory agents such as Toll-like receptor (TLR) agonists CpG and imiquimod; wherein the combination therapy provides increased effector cell killing of tumor cells, i.e., a synergy exists between the IL-2 variants and the immunotherapy when co-administered.

[0208] In various embodiments, the combination therapy comprises administering an IL-2 variant and the second agent composition simultaneously, either in the same pharmaceutical composition or in separate pharmaceutical composition. In various embodiments, an IL-2 variant composition and the second agent composition are administered sequentially, i.e., an IL-2 variant composition is administered either prior to or after the administration of the second agent composition. In various embodiments, the administrations of an IL-2 variant composition and the second agent composition are concurrent, i.e., the administration period of an IL-2 variant composition and the second agent composition overlap with each other. In various embodiments, the administrations of an IL-2 variant composition and the second agent composition are non-concurrent. For example, in various embodiments, the administration of an IL-2 variant composition is terminated before the second agent composition is administered. In various embodiments, the administration second agent composition is terminated before an IL-2 variant composition is administered.

[0209] The following examples are offered to more fully illustrate the disclosure but are not construed as limiting the scope thereof.

### Example 1

### Design of the IL-2 Variants to Selectively Targeting Treg Cells

[0210] In one aspect the current invention is directed one or more mutations to attenuate the affinity of IL-2 for the IL-2Rβ and/or γc receptor subunits. In the context of weakened IL-2Rβγ interaction, the enhanced IL-2 sensitivity of Tregs conferred by IL-2Rα expression may result in a pronounced growth advantage for this cell subset. As a result, these mutants could serve as Treg promoters in autoimmune and inflammatory diseases.

[0211] The variants were designed computationally based on the reported structure of human IL-2 in Protein Data Bank (PDB code 2B5I). A panel of variants were designed including 1 to 3 mutations (introducing conservative and non-conservative amino acid substitutions) in residues that are at or near the interface that make direct contact with IL-2Rβ or yc receptor subunits. For example, D20 is engaged in an extensive network of hydrogen bonds to receptor subunit side chains at the IL-2Rβ interface. Similarly, N88 is an energetic hot spot for the IL-2/IL-2Rβ interaction, engaging in critical hydrogen bonds with the receptor chain. Q126 is integral to the γc interaction, and Q22 is similarly at the γc interface. The present inventors postulated that mutations at the above-mentioned sites or neighboring residues may result in a defect in their ability to interact with the IL-2 intermediate affinity receptor IL-2Rβγ.

[0212] Interestingly, the proposed ‘¹⁹LDL’ motif resembling a component of bacterial toxins (Baluna R, Rizo et. al., Proc Natl Acad Sci 1999; 96:3957-62) overlaps with the IL-2Rβ interface. This ‘toxic motif’ is responsible, in part, for direct vascular toxicity of IL-2. As a result, replacement of the critical toxic motif residue D20, or mutations introduced to substitute the flanking residues, L19 and L21 with non-aliphatic residues, was expected to also eliminate the toxic motif and prevent endothelial cell damage and significantly reduce VLS as well.

[0213] In the present invention, a panel of IL-2 variants (SEQ ID NOs: 4-43, 113-151, 208-212, 275-292) with the following 1-3 amino acid substitutions (D20T, D20E, D20N, D200, D20S, D20Y, D20I, L19Y, L19N, L19R, L190, L19H, L19D, L19P, L19S, L21S, L21N, L21R, N88R, N88G, N88I, N88Q, N88E, N88T, N88M, Q126E, Q126L, Q126N, Q126D, Q126M, Q126K, Q126H, Q126Y, Q126R, Q126S, Q126T, Q125E, S125K, S125H, S125W, S125I, Q22N, Q22H, Q22K, Q22Y, Q22I, D20I/N88G, D20I/N88R, D20T/N88R, D20I/N88I, D20T/Q126E, D20T/N88R/Q126E, D20T/Q126L, D20T/N88R/Q126L, L19N/Q126E, L19R/Q126E, L19Y/Q126E, L19H/Q126E, L190/Q126E, L19S/Q126E, L19Y/Q126K, L19Y/Q126H, L19Y/Q126Y, L19Y/S125E, L19Y/S125K, L19Y/S125H, L19Y/S125W, L19Y/S125I, L19Y/Q22N, L19Y/Q22H, L19Y/Q22K, L19Y/Q22Y, L19Y/Q22I, L19H/Q126K, L19H/S125I, L19D/S125I, D20E/S25I, D20T/S125I, and L19Y/S125I/Q126E, L19H/S125I/Q126E, L19H/S125I/Q126K, L19Q/S125I/Q126E, L19Q/Q126K, L19Q/S125I/Q126K, D20T/S125I/Q126K, L19N/S125I/Q126K, L19N/S125I/Q126E, L19R/S125I/Q126K, L19D/S125I/Q126E, D20E/S125I/Q126E, L19H/S125I/Q126D, L19H/S125I/Q126D, L19H/S125I/Q126H, L19H/S125I/Q126N, L19H/S125I/Q126R, L19H/S125I/Q126S, L19H/S125I/Q126T) and L19H/S125I/Q126E plus various N-terminal deletions (SEQ ID NOS: 288-291) were expressed as C-terminal fusions to the Fc homodimer via a “GGGSGGGS” linker (SEQ ID NO: 55). IL-2 variants with D20I, D20I/N88G, D20E, or L19N amino acid substitutions were also expressed as N-terminal fusions to the Fc homodimer via a rigid “AEAAAKEAAAKEAAAKA” linker (SEQ ID NO: 53). Collectively, the sequences of these IL-2 variant Fc fusion constructs are listed with SEQ ID NOS: 73-112, 152-194, 213-219, 299-305. Constructs with wild-type IL-2 in the same Fc fusion formats (both C- and N-terminal) were also made (SEQ ID NOS: 71 and 72).

[0214] All of the above IL-2 variant Fc fusion molecules are designed to afford a growth advantage to cells that highly express IL-2Rα, leading to the preference for Treg cells versus other lymphocytes proliferation, including CD4+ conventional T cells, CD8+ T cells, and NK cells. Further, the mutations at position 19, 20, or 21 are expected to eliminate the toxic motif responsible for vascular toxicity, so the resulting molecules may have two beneficial properties, including enhanced selectivity for Treg activation and reduced endothelial cell damage. Nevertheless, optimal mutation or mutation combination is critical to tune the level of impairment to maintain high enough potency while maximizing the window for selective targeting of Treg subset.

### Example 2

### Design of the IL-2 Constructs to Improved Selectivity for Effective T Cells and NK Cells

[0215] Another aspect of this invention is to improve IL-2 selectivity for cells expressing IL-2Rβγ (but not IL-2Rα) over cells expressing IL-2Rαβγ relative to wild-type IL-2 for cancer therapy. One approach is to decrease or abolish the binding of IL-2 to IL-2Rα to reduce the stimulation of Treg cells. IL-2Rα-interacting amino acids R38, F42, and P65 were mutated to reduce or abolish binding to IL-2Rα. Additionally, impairment of IL-2 variants in binding to IL-2Rα+ pulmonary endothelial cells is expected to prevent endothelial cell damage and significantly reduce VLS. IL-2 variants (SEQ ID NOs: 220-234, and 293-299) with the amino acid substitutions listed in Table 4F were expressed as C-terminal fusions (SEQ ID NOS: 235-249) to the Fc homodimer via a “GGGSGGGS” linker (SEQ ID NO: 55).

[0216] Alternatively, constructs with improved selectivity for cells expressing IL-2Rβγ over cells expressing IL-2Rαβγ can be achieved by making IL-2/IL-2Rα complex Fc fusion. The rationale for the improved selectivity is that the IL-2/IL-2Rα complex fusion would be able to form the high affinity complex without requiring binding to cell-associated IL-2Rα. IL-2 and IL-2Rα complexation can be either covalent or non-covalent. For covalent complexation, IL-2RαSushi (SEQ ID NO: 68) was fused between an Fc polypeptide (SEQ ID NO: 45) and IL-2 (SEQ ID NO: 3) both through the flexible linker (SEQ ID NO: 45). IL-2 can be at either the N-terminus (SEQ ID NO: 69) or the C-terminus (SEQ ID NO: 70). The non-covalent complexation was achieved by fusing IL-2 to either N- or C-terminus of a Hole-Fc chain (SEQ ID NO: 47), and fusing IL-2RαSushi to either N- or C-terminus of a Knob-Fc chain (SEQ ID NO: 46). Co-expression of the two resulted polypeptides (SEQ ID NOS: 196 and 197 for C-terminal fusion) yields heterodimeric Fc fusion proteins (P-0482) with IL-2 non-covalently complexed with IL-2RαSushi on the opposite chain.

### Example 3

### Construction and Production of IL-2 Fc Fusion Constructs

[0217] All genes were codon optimized for expression in mammalian cells, which were synthesized and subcloned into the recipient mammalian expression vector (GenScript). Protein expression is driven by an CMV promoter and a synthetic SV40 polyA signal sequence is present at the 3′ end of the CDS. A leader sequence has been engineered at the N-terminus of the constructs to ensure appropriate signaling and processing for secretion.

[0218] The constructs were produced by co-transfecting HEK293-F cells growing in suspension with the mammalian expression vectors using polyethylenimine (PEI, 25,000 MW linear, Polysciences). If there were two or more expression vectors, the vectors were transfected in a 1:1 ratio. For transfection, HEK293 cells were cultivated in serum free FreeStyle™ 293 Expression Medium (ThermoFisher). For production in 1000 ml shaking flasks (working volume 330 mL), HEK293 cells were seeded at a density of 0.8×10⁶ cells/ml 24 hours before transfection. A total of 330 μg of DNA expression vectors were mixed with 16.7 ml Opti-mem Medium (ThermoFisher). After addition of 0.33 mg PEI diluted in 16.7 ml Opti-mem Medium, the mixture was vortexed for 15 sec and subsequently incubated for 10 min at room temperature. The DNA/PEI solution was then added to the cells and incubated at 37° C. in an incubator with 8% CO₂. Sodium butyrate (Millipore Sigma) was added to the cells at day 4 at a final concentration of 2 mg/L to help sustain protein expression. After 6 days cultivation, supernatant was collected for purification by centrifugation for 20 min at 2200 rpm. The solution was sterile filtered (0.22 μm filter, Corning). The secreted protein was purified from cell culture supernatants using Protein A affinity chromatography.

[0219] Alternatively, the constructs were produced in ExpiCHO cells (ThermoFisher) following manufacturer's instructions.

[0220] For affinity chromatography each supernatant was loaded on a HiTrap MabSelectSure column (CV=5 mL, GE Healthcare) equilibrated with 25 ml phosphate buffered saline, pH 7.2 (ThermoFisher). Unbound protein was removed by washing with 5 column volumes PBS, pH 7.2 and target protein was eluted with 25 mM sodium citrate, 25 mM sodium chloride, pH 3.2. Protein solution was neutralized by adding 3% of 1 M Tris pH 10.2. Ion exchange chromatography or mix-mode chromatography, including but not limited to CaptoMMC (GE Healthcare), ceramic hydroxyapatite, or ceramic fluoroapatite (Bio-Rad) was also utilized to polish the Protein A material as needed. Target protein was concentrated with an Amicon®Ultra-15 concentrator 10 KDa NMWC (Merck Millipore Ltd.)

[0221] The purity and molecular weight of the purified constructs were analyzed by SDS-PAGE with and in the absence of a reducing agent and staining with Coomassie (Imperial® Stain). The NuPAGE® Pre-Cast gel system (4-12% or 8-16% Bis-Tris, ThermoFisher) was used according to the manufacturer's instructions. The protein concentration of purified protein samples was determined by measuring the UV absorbance at 280 nm (Nanodrop Spectrophotometer, ThermoFisher) divided by the molar extinction coefficient calculated on the basis of the amino acid sequence. The aggregate content of the constructs was analyzed on an Agilent 1200 high-performance liquid chromatography (HPLC) system. Samples were injected onto an AdvanceBio size-exclusion column (300 Å, 4.6×150 mm, 2.7 μm, LC column, Agilent) using 150 mM sodium phosphate, pH 7.0 as the mobile phase at 25° C.

[0222] It is worth noting that the expression profiles and aggregation propensities of IL-2 variant Fc fusions vary significantly between constructs with different mutation sites or mutants sharing the same mutation site but different residue substitutions.

### Example 4

### A Single Amino Acid Substitution in IL-2 Results in Universal Improvement in the Developability of the Fusion Compounds

[0223] The engineering approach to find a combination of mutations that result in a variant protein with the desired biological properties encountered significant challenges when applied to IL-2. It is known in the field that naturally occurring IL-2 protein tends not to be very stable and is prone to aggregate. This was demonstrated in our experiments that the wild-type IL-2 Fc fusion protein (P-0250) expressed at a low level (around 3 mg/L transiently in HEK-293F cells) with high aggregation propensity, exemplified by SEC chromatogram depicted in FIG. 1A. The engineering efforts floundered as amino acid substitutions in IL-2 aimed at the desired biological activity typically resulted in mutant proteins that are even less stable. A significant portion of IL-2 variants of the current work expressed at extremely low level, and some variants were significantly more aggregation prone, exemplified by SEC chromatogram of P-0318 (SEQ ID NO: 97) depicted in FIG. 1B. This is problematic for the manufacture and storage of a therapeutic agent.

[0224] It was also observed that the expression profiles and aggregation propensities of IL-2 variant fusions vary significantly among constructs with different mutation sites or mutants sharing the same mutation site but different residue substitutions. This observation is exemplified by P-0317 (SEQ ID NO: 96) and P-0318. Both variant fusions share the same mutation sites at residues 20 and 88 and differ only by one amino acid. P-0317 harbors amino acid substitutions of D20I and N88R while P-0318 contains D20I and N881 mutations. Both variant fusions expressed at similarly low level. As can be seen in FIG. 1B, P-0318 is very aggregation prone: 65% high-molecular weight species, which makes the expected peak as the minor species in the chromatogram and was marked with an arrow. In contrast, P-0317 is relatively pure with 7.5% aggregates (FIG. 10). It would be deduced that N88R mutation may reduce aggregation propensity of the resulting fusion proteins. However, IL-2 with N88R single mutation, or D20T/N88R dual mutations, the resulting fusion proteins, P-0254 (SEQ ID NO: 73) and P-0324 (SEQ ID NO: 98), respectively, were aggregation prone with 30-40% aggregates. This suggests that the contributions of individual amino acid substitution to the protein stability seem to be context dependent.

[0225] The fact that amino acid substitutions to IL-2 typically result in less stable protein was further compounded by the unpredictable contributions of different residue substitutions to the protein stability. It is thus very desirable to find residue substitution(s) that can universally enhance protein developability, including improved stability, higher expression level, and lower aggregation propensity.

[0226] Amino acid substitutions at position 125 was originally aimed at tuning IL-2 selectivity as the residue is in immediate proximity to Q126, which is integral to the γc interaction. Naturally occurring IL-2 contains an unpaired cysteine at position 125, which was replaced by a serine in Proleukin, and S125 is considered as wild type IL-2 residue in the present invention. IL-2 containing alanine substitution at position 125 is also widely used. As substitution of serine or alanine for cysteine at position 125 retained full biological activity, bulky charged or hydrophobic residues, including Glu, Lys, Try, His, and Ile, were introduced at position 125 to replace Ser of P-0372 (SEQ ID NO: 81) aiming to interfere the interaction of Q126 with γc so as to achieve altered biological activity. All the resulting fusion molecules but P-0471 (SEQ ID NO: 183) expressed at too low level to be characterized. P-0471, on the contrary, when compared to its S125 counterpart (P-0372), expressed at a significantly higher level (19.3 mg/L vs 4.0 mg/L titer) with greatly reduced aggregation propensity (1% vs 21.7% aggregation). The impressive improvement in developability, especially on the product purity prompted us to evaluate whether such enhancement by isoleucine substitution at position 125 can be recapitulated in different mutational context.

[0227] S125I substitution was thus introduced into a number of IL-2 variant Fc fusion molecules. The constructs harboring Ile-125 substitution in IL-2 were expressed using the same vector and in the same culturing conditions as their Ser-125 counterparts and purified using MabSelectSure. The expression level in mg/L and purity assessed by SEC chromatography in aggregation % of exemplary molecules are summarized in Table 6. The two molecules in the same row of Table 6 share the same other amino acid substitution(s) and differ only at residue 125 with either serine or isoleucine. As an example, the SEC chromatogram and SDS-PAGE pictures of P-0447 (SEQ ID NO: 173) and its Ile-125 counterpart P-0511 (SEQ ID NO: 213) were further illustrated in FIGS. 1D and 1E. It is clear from Table 6 that isoleucine substitution at position 125 resulted in 4 to 11-fold enhanced expression level and uniformly low aggregation propensity.

TABLE 6
The 125I substitution reduced aggregation and increased
expression of various IL-2 fusion proteins

| | | | | | | expres- |
|---|---|---|---|---|---|---|
| Serine-125 | | | Isoleucine-125 | | | sion |
| | Aggre- | Expres- | | Aggre- | Expres- | fold↑ by |
| Protein | gation | sion | Protein | gation | sion | S125I |
| ID: | % (SEC) | (mg/L) | ID: | % (SEC) | (mg/L) | substitution |
| P-0250 | 25.7 | 3.1 | P-0531 | 0.7 | 29.5 | 9.6 |
| P-0424 | 21.4 | 7.7 | P-0491 | 0.6 | 36.7 | 4.8 |
| P-0425 | 32.6 | 2.6 | P-0492 | 0 | 13.6 | 5.2 |
| P-0372 | 21.7 | 4.0 | P-0471 | 1.0 | 19.3 | 4.8 |
| P-0363 | 29.4 | 1.4 | P-0494 | 0.5 | 11.7 | 8.4 |
| P-0364 | 21.1 | 0.7 | P-0493 | 1.7 | 7.9 | 11.3 |
| P-0447 | 23.7 | 7.3 | P-0511 | 0.7 | 26.6 | 3.6 |
| P-0419 | 33.8 | 6.7 | P-0495 | 0.8 | 23.5 | 3.5 |

[0228] It is evident from current invention that isoleucine substitution at position 125 resulted in universal improvement in developability of the IL-2 fusion constructs. This finding is especially valuable as engineering of IL-2 for desired biological properties had been hindered by the fact that altering marginally stable wild-type IL-2 typically results in even less stale mutant proteins. The inherent challenges of IL-2 engineering can be mitigated by a single amino acid substitution at position 125 with isoleucine.

### Example 5

### Identification of IL-2 Variants of Single Amino Acid Substitutions Demonstrating Differential Selectivity Towards Treg Lymphocytes

[0229] Single amino acid substitutions were introduced to IL-2 at positions corresponding to amino acids interacting with receptor subunit(s) β or γ or βγ. These substitutions were aimed to reduce IL-2 signaling capacity through the intermediate affinity IL-2Rβγ complex and confer signaling specificity from the high affinity IL-2Rαβγ. IL-2 variants containing single amino acid substitutions were examined for their ability to differentially stimulate STAT5 phosphorylation in CD4 positive Treg and Tconv cells. STAT5 is known to be involved in the downstream signaling cascade upon IL-2 binding to the transmembrane IL-2 receptors. The phosphorylation of STAT5 in defined lymphocyte subpopulations was measured using fresh human peripheral blood mononuclear cells (PBMC) and the forkhead transcription factor FOXP3 was used to identify the Treg population in FACS analysis.

[0230] Briefly, human PBMC were isolated by Ficoll-Hypaque centrifugation from the buffy coat of a healthy donor. PBMC were starved in serum-free MACS buffer at 4° C. for 1 hour. 2×10⁵ PBMC were then treated with serial dilutions of test compounds for 30 min at 37° C. Cells were fixed and permeabilized with Foxp3/Transcription Factor Staining Buffer Set (EBIO) by incubating with 1× Foxp3 fixation/permeabilization working solution for 30 minutes and washing with 1× permeabilization buffer. Cells were additionally fixed with Cytofix buffer and permeabilized with Perm Buffer III (BD Biosciences) and then washed. After blocking Fc receptors by adding human TruStain FcX (1:50 dilution), cells were stained with a mixture of anti-CD25-PE, anti-FOXP3-APC, anti-pSTAT5-FITC, and anti-CD4-PerCP-Cy5.5 antibodies at concentrations recommended by the manufacturer for 45 minutes at room temperature. Cells were collected by centrifugation, washed, resuspended in FACS buffer, and analyzed by flow cytometry. The flow cytometry data was gated into CD4+/Foxp3+/CD25^{high} and CD4+/Foxp3−/CD25^{low} groups for the Treg and CD4 conventional T cell subsets, respectively. Data are expressed as a percent of pStat5 positive cells in gated population.

[0231] FIG. 2 shows the dose-response effects of exemplary Fc fusion proteins of IL-2 variants on STAT5 phosphorylation in CD4 positive Treg and Tconv cells in comparison with the wild type fusion protein. The wild type IL-2 Fc fusion protein (P-0250) induced STAT5 phosphorylation in both Treg and Teff cells with EC₅₀ values of 0.1 pM and 25.4 pM, respectively. The potency of wild type IL-2 was about 250-fold greater in Treg cells than in CD4+ Tconv cells, coinciding with the higher expression levels of the high affinity trimeric receptors in Treg cells.

[0232] Various substitutions of the aspartic acid at position 20, P-0364 (D20E), P-0363 (D20T), P-0365 (D20N), P-0366 (D200) & P-0367 (D20S) demonstrated the ability to induce STAT5 phosphorylation in Treg cells while such activity was largely diminished or abolished in CD4+ Tconv cells (FIGS. 2A & 2B). These variants are potentially Treg-biased IL-2 agents to activate Treg cells for the treatment of autoimmune disease. Furthermore, a mutation at D20, the critical residue of the proposed toxin-like motif, is expected to eliminate the toxic motif and prevent endothelial cell damage. Therefore, these variants are expected to have Treg selective activity with improved safety profile on VLS. Additionally, P-0368 showed no biological activity (FIGS. 2A & 2B)

[0233] FIG. 3 shows the ability of IL-2 variant P-0375 (N88Q) to induce STAT5 phosphorylation in CD4 positive Treg and CD4+ Tconv cells in comparison with Benchmark-1 and Benchark-2 compounds harboring V91K and N88R mutations, respectively. The activity profile of the N88Q variant was similar to that of the Benchmark-1.

[0234] FIG. 4 shows the biological activity of IL-2 variants harboring various mutations at position 19 in comparison with the wild type. Variants P-0372 (L19Y), P-0373 (L19N), P-0374 (L19R), P-0423 (L19Q), P-0424 (L19H), and P-0427 (L19S) demonstrated similar activity as the wild type in inducing STAT5 phosphorylation in Treg cells (FIGS. 4A and 4C). Variants P-0372, P-0374, P-0423, and P-0427 also largely retained the biological activity in CD4+ Tconv cells (FIGS. 4B and 4D) while such activity was reduced in CD4+ Tconv for variants P-0373 and P-0424. Mutant P-0425 (L19D) demonstrated slightly reduced potency in inducing STAT5 phosphorylation in Treg cells while such activity was significantly impaired in CD4+ Tconv cells (FIGS. 4C & 4D). The demonstrated selective activation of Treg cells over CD4+ Tconv cells by mutants P-0373, P-0424, and P-0425, especially the wide window for selective targeting of Treg subset of P-0373 and P-0425, make them potential Treg-biased IL-2 agents to activate Treg cells for the treatment of autoimmune disease. Importantly, L19 is part of the proposed toxin-like motif, and mutations at this site is also expected to have improved safety profile with reduced VLS.

### Example 6

### Combination of IL-2Rβ and γ_{c}-Targeting Amino Acid Substitutions in IL-2 for Differential Selectivity Towards Treg Lymphocytes

[0235] It was demonstrated in Example 4 that directed mutations aimed to attenuate the affinity of IL-2 for either IL-2Rβ or γc receptor subunit can result in IL-2 mutants with differential selectivity towards Treg lymphocytes. It was then reasoned that modulation of the affinity of IL-2 for both IL-2Rβ and γc receptor subunits via combining one amino acid substitution(s) targeting β receptor and the other substitution(s) targeting γ receptor may yield desired potency and a selectivity window for Treg lymphocytes.

[0236] Such rationale is demonstrated in FIG. 5. FIGS. 5A and 5B show the effect of IL-2Rβ-targeting variant P-0372 (L19Y) on STAT5 phosphorylation in Treg and CD4+ Tconv cells in comparison with the wild type IL-2 fusion protein P-0250. Similarly, FIGS. 5C and 5D show the STAT5 phosphorylation activity for P-0303 (Q126E) harboring an amino acid substitution targeting to disturb the interaction with the γ receptor. The data suggested that each single amino substitution minimally impacted the pSTAT5 activation potency but also only showed a modestly improved selective window for Treg lymphocyte subset relative to the wild type. The window for selective activation of Treg cells was significantly widened by combining L19Y and Q126E mutations in P-0419 as demonstrated in FIGS. 5E and 5F. Treg activation potency was mainly reserved in P-0419, and the activity profile of the P-0419 variant was very comparable to that of the Benchmark-1 molecule that contains a V91K mutation. This strategy is particularly attractive as 19L is also part of the proposed toxin-like motif, and mutations at this site are also expected to have an improved safety profile with reduced VLS.

[0237] Combining one amino acid substitution targeting β receptor and the other substitution targeting γ receptor may not always yield desired potency and selectivity window. It requires the right amount of activity modulation for each aspect. The four IL-2 variants in FIGS. 6A and 6B share the same L19Y substitution targeting the beta receptor, and the additional mutation designed to target the γc receptor is Q126E in P-0419, Q126K in P-0464, S125I in P-0471, and Q22K in P-0474, respectively. While all mutants retained comparable potency in inducing STAT5 phosphorylation in Treg cells (FIG. 6A), such activity varied significantly in CD4+ Tconv cells (FIG. 6B), demonstrating differential ability in tuning selectivity of Treg activation via combining amino acid substitutions.

[0238] Compounding additional receptor attenuation by combining Q126E substitution to IL-2 variants that already demonstrated biased specificity for Treg subset may result in significantly diminished for Treg cells. While appears to be undesirable, it does generate Treg-selective IL-2 variants of a wide potency range. As demonstrated in (FIGS. 6C and 6D), both variants P-0373 (L19N) and P-0363 (D20T) already showed some or significant biased selective window for Treg cells (FIGS. 6C and 6D). Their respective counterparts with an additional Q126E substitution, P-0417 and P-0322, showed a pronounced reduced potency in Treg cell activation. Likewise, P-0860 (harboring IL-2 L19D/S125I/Q125E mutations) and P-0859 (L19N/S125I/Q125E) showed different levels of potency attenuation in Treg cell activation (FIG. 6E). Compared to P-0511 (harboring IL-2 L19H/S125I/Q125E mutations), the substitution of L19D instead of L19H resulted in 8500-fold reduction in Treg cell responsiveness (6226 pM vs. 0.74 pM).

[0239] Data in FIG. 6E further suggested that weak compounds induced lower signaling amplitude. The maximum possible effect of phosphorylation of STAT5 by P-0860 was strikingly lower than what can be achieved by P-0511, while the signaling strength moderately reduced for P-0859. Such compounds can function as partial agonist. Additional partial agonist of different signaling strength could be generated by optimal combination of amino acid substitutions to allow fine tuning of signaling amplitude. Thus, it is critical to find the right residue substitution combinations to tune the activity to the desired potency, singling strength, and biased specificity for Treg cells.

[0240] Further, potency attenuation and selectivity for Treg cells can also be achieved by amino acid deletions. N-terminal deletion of 5, 7, or 9 amino acids was introduced to P-0511 to make P-0862, P-0863, and P-0864, respectively. As depicted in FIG. 6F, while 5- and 7-aa deletions fully retained potency, 9-aa deletion resulted in a 25-fold activity impairment (18 pM vs. 0.74 pM). It is expected that various IL-2 variants of different potency, singling strength, and specificity for Treg cells could be further tuned for desired activity profile with amino acid deletions of 8 to 10 amino acids at the N-termini.

[0241] Additional variants harboring double amino acid substitutions at sites L19 and Q126, including P-0447 (L19H/Q126E), P-0448 (L19Q/Q126E), and P-0449 (L19S/Q126E) were evaluated, and the activity was shown in FIGS. 7A-7D. Compared to IL-2 variants each containing one single amino acid substitution P-0424 (L19H) and P-0303 (Q126E), the variant harboring the combination of the two amino acid substitutions P-0447 (L19H, Q126E) demonstrated robust biological activity in stimulation of STAT5 phosphorylation in Treg cells while such activity was nearly completely abolished in Tconv cells (FIGS. 7A and 7B). In a separate study evaluating P-0419, P-0447, P-0448 and P-0449 in comparison with two benchmark compounds, all four variants demonstrated significant potency in inducing STAT5 phosphorylation in Treg cells, while such activity was largely abolished in CD4+ Tconv cells (FIGS. 7C and 7D). P-0419 has a comparable activity profile to Benchmark-1, which was similarly demonstrated in FIGS. 5E and 5F, while P-0447, P-0448 and P-0449 are on par with Benchmark-2 in terms of potency and selectivity window for Treg cells.

[0242] All these mutants are potentially Treg-biased IL-2 agents to activate Treg cells for the treatment of autoimmune disease. Additionally, these mutants are also expected to have an improved safety profile with reduced VLS due to the elimination of the potentially toxic motif.

### Example 7

### IL-2 Variants with Isoleucine Substitution at Position 125 Retain Full Biological Activity

[0243] It was shown in Example 3 that isoleucine substitution at position 125 resulted in universal improvement in developability of the IL-2 fusion constructs. To make S125I substitution a viable approach to mitigate the developability challenges of IL-2 engineering, it is important to demonstrate that such amino acid replacement does not compromise the biological activity of resulting fusion proteins in comparison to their Ser-125 counterparts.

[0244] The S125I substitution was then introduced into wild-type IL-2 or IL-2 variants that already harbored 1 or 2 mutations targeting receptor subunit(s) β or γ or βγ. The resulting IL-2 variants containing isoleucine at position 125 were tested for their ability to stimulate STAT5 phosphorylation in Treg and Tconv cells in comparison with their respective serine counterparts at position 125. Table 7 lists the potency and selectivity of IL-2 variants in Treg cells. The two molecules in the same row of Table 7 share the same other amino acid substitution(s) and differ only at position 125 with either serine or isoleucine. The data demonstrated that the S125I substitution fully retained or slightly improved the biological activity of various tested IL-2 variants without altering the Treg specificity.

TABLE 7
IL-2 variants containing S125I substitution retained the
biological activity and selectivity towards Treg cells

| Serine-125 | | | Isoleucine-125 | | |
|---|---|---|---|---|---|
| | Treg | Treg | | Treg | Treg |
| Protein ID: | EC₅₀ (pM) | Selectivity | Protein ID: | EC₅₀ (pM) | Selectivity |
| P-0250 | 0.049 | Yes | P-0531 | 0.012 | Yes |
| P-0424 | 0.026 | Yes | P-0491 | 0.029 | Yes |
| P-0425 | 1 | Yes | P-0492 | ~0.10 | Yes |
| P-0372 | 0.05 | Yes | P-0471 | 0.09 | Yes |
| P-0364 | 3.61 | Yes | P-0493 | 0.08 | Yes |
| P-0447 | 1.71 | Yes | P-0511 | 0.76 | Yes |
| P-0419 | 0.56 | Yes | P-0495 | ~0.33 | Yes |
| P-0480 | 0.24 | Yes | P-0512 | 0.35 | Yes |

[0245] Data from three exemplary constructs, P-0250, P-0424, and P-0447, and their S125I equivalents: P-0531, P-0491, and P-0511, respectively, were shown in FIG. 8. P-0250 is the wild-type IL-2 Fc fusion molecule, P-0424 contains one amino acid substitution L19H, and P-0447 comprise two amino acid substitutions L19H/Q126E. Their dose-dependent effect on STAT5 phosphorylation in Treg and CD4+ Tconv cells is illustrated in FIG. 8. As shown in FIGS. 8A-8F, S125I substitution slightly increased potency of the three tested compounds without altering Treg selectivity for P-0531 and P-0491; for P-0511, S125I substitution further widened the Treg selectivity window.

[0246] The data thus demonstrated that the S125I substitution in IL-2 retains the IL-2 activity profile of the IL-2 fusion protein of different mutational context. In summary, isoleucine substitution at position 125 of IL-2 resulted in universal developability improvement (increased production yield, reduced aggregation, lowered immunogenicity potential) for IL-2, IL-2 fusions, IL-2 variants and IL-2 variant fusions and full retention of the biological activity and selectivity. This specific amino acid substitution represents a viable mitigation strategy to address the inherent IL-2 engineering challenges.

### Example 8

### Effects of IL-2 Variants on CD25+CD4+ T Cells, CD8 Cytotoxic T Cells and NK Cells

[0247] In addition to being assessed for their ability to differentially stimulate Stat5 phosphorylation in CD4 positive Treg (CD4+/Foxp3+/CD25^{high}) versus Tconv (CD4+/Foxp3−/CD25^{low}) cells, two variants, P-0511 and P-0512, were further assayed for their ability to stimulate other effector T and NK cells, including CD4 positive Teff (CD4+/Foxp3-/CD25+), CD8 cytotoxic T effector and NK cells in comparison to wild-type IL-2 (P-0250) and three IL-2 benchmark molecules containing V91K, N88R, N88D respectively.

[0248] IL-2 variants of the current invention have weakened IL-2Rβγ interaction, and the pronounced growth advantage of Treg versus CD4+ Tconv by these variants was conferred by the high constitutive IL-2Rα (CD25) expression in Treg. CD25 expression can be induced in CD4+ T effector cells after immune stimulation. It is thus desirable to confirm that IL-2 variants retain Treg specificity over other CD25+ lymphocyte subsets. Exemplary lymphocyte subset with medium to high expression level of CD25 includes CD4+ effector T cells (Teff).

[0249] After human PBMC Cells were treated with serial dilutions of test compounds, fixed and permeabilized, washed, and stained with a mixture of anti-CD25-PE, anti-FOXP3-APC, anti-pSTAT5-FITC, and anti-CD4-PerCP-Cy5.5 antibodies, the flow cytometry analysis was gated into CD4+/Foxp3+/CD25+, CD4+/Foxp3−/CD25+, CD4+/Foxp3−/CD25− groups for the Treg, CD4 effector, and CD4 naive T cell subsets, respectively. Data are expressed as a percent of pStat5 positive cells in gated population and illustrated in FIG. 9. P-0512 has a comparable activity profile to Benchmark-1 for all the three T cell subsets, while P-511 is superior to both Benchmark-2 and -3 in terms of potency and selectivity window for Treg cells versus both Teff and naïve CD4 T cells. Benchmark-2 showed much weaker potency in activating each of the three subsets. Despite the expression of CD25 at medium to high level on Teff, the preferential activation of Treg over Teff by IL-2 variants with attenuated IL-2Rβγ interaction, especially P-0511, was clearly demonstrated in FIGS. 9A and 9B.

[0250] Further, P-0511 and P-0512 were tested for their ability to stimulate NK and CD8+ T cells proliferation in comparison with the wild type and benchmark molecules. Intracellular fluorescent label carboxyfluorescein diacetate succinimidyl ester (CFSE) method was utilized. Briefly, human PBMC (1×10⁵ cells/well) were labeled with CFSE, plated onto 96-well plates, and incubated with increasing concentrations of different IL-2 compounds. Cells were then harvested after 5 or 7 days of incubation and stained with either anti-CD56-APC antibody for NK cells or anti-CD8-APC antibody for CD8+ T cells; and analyzed by flow cytometry. Data are expressed as a percent of divided cells and illustrated in FIG. 10A for CD8+ T cell proliferation and FIG. 10B for NK cell proliferation.

[0251] As expected, all IL-2 variants showed weakened potency in stimulating both CD8+T and NK cells compared to P-0250, the wild-type IL-2 fusion molecules. In corroboration with the observation in STAT5 phosphorylation assay (FIG. 9), P-0512 has a comparable activity profile to Benchmark-1, and P-511 is on par with Benchmark-3 in terms of potency for both lymphocyte subsets, while Benchmark-2 exhibited much weaker potency.

[0252] The Stat5 phosphorylation activity on other responder cells than CD4+ T cell subsets, including CD8+T and NK, by P-0511 was compared to P-0531, the S125I equivalent of wild-type P-0250. P-0511 exhibited profound activity in stimulation of STAT5 phosphorylation in Treg cells similarly as P-0531 wild type fusion (FIG. 11A), while such activity was nearly completely abolished in CD4+ Tconv (FIG. 11B), CD8+T (FIG. 11C), and NK (FIG. 11D) cells. IL-2 receptors expressed on CD4+ Tconv, CD8+T and NK cells are primarily dimeric IL-2Rs, comprising IL-2R6 and γc. To confirm that the significantly diminished pSTAT5 signaling by P-0511 on CD8+ T and NK cell was due to its impaired interaction with IL-2R6 and γc, an ELISA assay was developed.

[0253] Briefly, non-covalent complex of IL-2R6-ECD (NP_000869) and γc-ECD (NP_000197) through heterodimeric Fc chains was coated onto the wells of Nunc Maxisorp 96-well microplates at 2 μg/well. After overnight incubation at 4° C. and blocking with superblock (ThermoFisher), 3-fold serial dilutions of IL-2 Fc fusion proteins starting at either 100 or 270 nM were added to each well at 100 Following a one-hour incubation at room temperature, biotin mouse anti-human IL-2 Ab (BD BioSciences) at 1 μg/ml was added to each well followed by incubation with HRP-Avidin (ThermoFisher) at 1 μg/ml for 1 hour. Wells were thoroughly aspirated and washed three times with PBS/0.05% Tween-20 following each step. Finally, 100 TMB substrate was added to each well; the plate was developed at room temperature in the dark for 10 minutes, and 100 of stop solution (2N Sulfuric acid, Ricca Chemical) was added. Absorbance was determined at 450 nm; curves were fit using Prism software (Graph Pad) and illustrated in FIG. 11E.

[0254] As shown in FIG. 11E, the developability-improved wild-type IL-2 fusion protein, P-0531, bound to the IL-2 dimeric receptor complex with sub nanomolar affinity (EC₅₀=0.06 nM); Benchmark-1 molecule showed reduced binding (EC₅₀=1.6 nM), which agreed with its accordingly diminished potency in stimulating STAT5 phosphorylation in CD8+T and NK cells (FIGS. 10A-B). In contrast, P-0511 did not show appreciable binding to IL-2Rβ and γc complex, indicating that the two IL-2 mutations of P-511 at the interfaces with both β and γc receptor subunits dramatically impaired its interaction with the complex. With virtually abolished binding to the dimeric IL-2 receptor complex, it is striking that P-0511 exhibited only slightly reduced activity on Treg compared to wild-type IL-2 fusion. P-0511 exemplifies IL-2 variant with desired potency and selectivity window for Treg lymphocytes.

[0255] In summary, a spectrum of IL-2 variants listed in Table 4A-4H were constructed, expressed, and tested in in vitro assays. Biological activities of exemplary IL-2 variants in Treg vs other lymphocyte subsets, including CD4+ Tconv, CD4+ Teff, CD8+ T and NK cells, were demonstrated in FIGS. 2-11. Many variants retained high potency for Treg cells with reduced or abolished activity for Tconv cells and other lymphocyte subsets. Some variants have a similar activity profile as Benchmark-1 while others resemble the activity feature of Benchmark 2 or 3. Further, majority of the IL-2 variants had the proposed toxin-like motif eliminated aiming to reduce VLS. Importantly, the incorporation of S125I amino acid substitution yielded IL-2 variant fusions with superior developability profiles while retaining biological activity and selectivity in Treg cells. These variants are potentially Treg-biased IL-2 agents for the treatment of autoimmune disease with an improved safety profile.

### Example 9

### Fc Fusion Proteins of IL-2 Variants Preferentially Proliferate and Expand Treg Cells in Mice

[0256] IL-2 variant Fc fusion proteins were administered to mice and their ability to preferentially proliferate and expand regulatory T cells (CD4+CD25+FoxP3+ T cells) over effector T cells and NK cells were determined in vivo.

[0257] Female C57/BL6 mice (7-week old) were received from Charles River Laboratory and acclimated in house for at least 7 days before the study. Vehicle (PBS), 0.3 mg/kg of each test compounds, or IL-2 benchmark compounds were subcutaneously administered to mice on day 0. Peripheral blood samples were collected into heparin-treated tubes on days 3, 5 and 7 post-treatment. Each group contained 6 mice and baseline blood was collected 2 days prior to the treatment (day −2). After red blood cell lysis, total viable mononuclear blood cells were counted by trypan blue dead cell exclusion method and proceeded to intracellular staining for immune cell phenotype and Ki67 proliferation markers using flow cytometric analysis. Cells were stained separately with two panels of antibodies as listed: 1) anti-mouse Foxp3-FITC, Ki67-PE, anti-mouse CD25-APC and anti-mouse CD4-Percpcy5.5 (1:50 dilution) for CD4+T-regulatory cells (Treg); 2) anti-mouse CD3-FITC, Ki67-PE, anti-mouse CD335-APC and anti-mouse CD8-Percpcy5.5 (1:50 dilution) for CD8+T and NK cells.

[0258] All tested IL-2 compounds stimulated Treg cell proliferation and expansion as demonstrated by increased Ki67 positive Treg cells and elevated percentage of Treg over total CD4+ T cells or total lymphocytes (FIGS. 12A-12C). The effect was observed 3 days post injection and persisted to day 5 or day 7 following one single injection. In contrast to ex vivo observations that Benchmark-1 consistently exhibited highest potency among IL-2 variants in inducing Treg phosphorylation, all three tested variants, P-0511, P-0512 and P-0514, demonstrated stronger in vivo efficacy in stimulation of Treg cell proliferation and expansion than benchmarks in mice. P-0511, P-0512 and P-0514 exhibited comparable activity. The relative in vivo potency ranking between the three benchmarks agreed with the ex vivo human PBMC cell assay, namely Benchmark-1 compounds was of the highest potency, followed by Benchmark-3. Benchmark-2 is much weaker in proliferating and expanding Treg cells. (FIG. 12A-12C).

[0259] On T effector and NK cells, Benchmark-1 showed strong Ki67 stimulation on cytotoxic CD8 T cells and NK cells, while Benchmark-2 and 3 showed low effects on CD8 T cells and NK cells (FIG. 13A-13C). Variant P-0514 showed similar Ki67 stimulation on CD8+ T cells as Benchmark-1, while variants P-0511 and P-0512 showed mild Ki67 stimulation on CD8 T cells and NK cells as Benchmark-2 and 3 (FIG. 13A-13C). Data suggest variants P-0511 and P-0512 demonstrate superior biological activity and selectivity on Treg compared to Benchmark 1 & 2. Benchmark-3 was not efficacious to stimulate and expand both Treg and effector cells.

[0260] The percentage of CD4+T conventional cells was reduced in all IL-2 variant-treated groups due to increased Treg population (FIG. 14A). No significant expansion of CD4+ Tconv cells, CD8 T cells or NK cells was observed in mice treated with any of Treg biased IL-2 variants (P-0511, P-0512 and P-0514) nor the three benchmarks (FIG. 14B-14D).

[0261] Compared to the three benchmarks, all three variants, P-0511, P-0512, and P-0514, also exhibited the most beneficial Treg/Tconv ratio both in terms of Ki67 stimulation and cell expansion based on the cell counts at all measured time points (FIGS. 15A and 15B).

[0262] The expression of Foxp3 increased on Treg cells by all tested IL-2 compounds 3 days post injection (FIG. 16A), and all three variants exhibited comparably higher expression of CD25 and Foxp3 markers than the three benchmarks (FIGS. 16A and 16B), suggesting superior Treg activation and functionality.

[0263] Body weights were monitored prior to and during the treatment. No significant weight changes were observed (Data not shown).

[0264] Overall, the data demonstrated that variants P-0511, P-0512 and P-0514 exhibit the ability to promote activation, proliferation and expansion of immunosuppressive Treg cells while sparing CD4+ conventional cells, cytotoxic effector T cells and NK cells. The data also evidenced the superiority of these three variants over benchmark molecules in terms of both efficacy and selectivity on Treg proliferation and expansion. These variants may serve as therapeutic agents to combat autoimmune and inflammatory diseases as well as rejection of organ transplantation.

### Example 10

### A Dose-Response Pharmacodynamics Study with IL-2 Variant Fc Fusion Protein in Mice Following a Single Injection

[0265] Following a single subcutaneous administration of vehicle (PBS) or P-0511 (1, 0.3, 0.1, or 0.03 mg/kg) to female Balb/C mice (n=5/group), peripheral blood was collected on day −2 as baseline, and post dose on days 3, 5, and 7. On day 7, mice were sacrificed, and spleens were harvested. Blood lymphocyte phenotyping, proliferation and expansion were measured by flow cytometry at each timepoint using fresh whole blood.

[0266] No significant changes in body weight or spleen weight in any treatment groups (data not shown)

[0267] As illustrated in FIG. 17, dose-dependent increases in the proliferation of Treg cells as reflected by increased percentage of Ki67 positive cells (FIG. 17A) were observed in mice treated with P-0511 at 1, 0.3, or 0.1 mg/kg dosing levels. Treatment at 0.03 mg/kg had minimal effect. Stimulation of Ki67 expression in Treg cells peaked on day 3 at the three higher dose levels and plateaued till day 5 before decline. As a result, P-0511 treatment resulted in elevations in the percentage of Treg over total CD4+ T cells (FIG. 17B), absolute Treg cell numbers (FIG. 17C) and fold change of cell counts from baseline (FIG. 17D) in a dose-dependent manner. The increases in Treg cell expansion followed a similar kinetic pattern as the proliferation/activation Ki67 markers (FIG. 17), namely culmination on day 3 and further extension to day 5. Dosing at 1 mg/kg stimulated a greater magnitude and duration of Treg and the signals sustained to day 5.

[0268] Treatment of P-0511 also resulted in a dose-dependent and statistically significant elevation of percentage of Treg over total lymphocytes (FIG. 18A), while no statistically significant changes in the percentages of CD4+ Tconv cells (FIG. 18B), CD8 Teff (FIG. 18C) and NK (FIG. 18D) cells over the total lymphocytes were observed. At the peak, Treg accounted for 4.5% of total lymphocytes with 1 mg/kg single dose treatment versus 3.1% at 0.3 mg/kg dosing and 1.4% at 0.1 mg/kg. In the vehicle control group, Treg represented 0.5% of the total lymphocytes (FIG. 18A).

[0269] The most beneficial Treg/Tconv ratio was calculated based on cell count (FIG. 19A). The Treg/Tconv ratio peaked at 0.27 for treatment at 1 mg/kg, 0.18 for 0.3 mg/kg, and 0.06 for 0.1 mg/kg versus 0.027 untreated (FIG. 19A), suggesting preferential expansion of Treg cells over Tconv cells by P-0511. Additionally, expression of Treg cell functional markers, including CD25 (FIG. 19B), and FoxP3 (FIG. 19C), increased dose-dependently. Increases in the mean fluorescence intensity (MFI) of CD25 and FoxP3 peaked on day 3 and diminished to a lower level on day 5.

[0270] Overall, the data demonstrated that P-0511 exhibit potent and preferential Treg activation and expansion in a dose-dependent manner. It requires careful considerations to achieve optimized dosing strategy for maximal potency to promote activation, proliferation and expansion of immunosuppressive Treg cells while sparing cytotoxic effector T cells and NK cells.

### Example 11

### A Pharmacodynamics Study in Mice Following Repeated Administration of IL-2 Variant Fc Fusion Proteins

[0271] Female Balb/C mice (7-week old) were acclimated in house for 5-7 days before the study. Vehicle (PBS), 0.3 mg/kg of P-0511, P-0512, P-0531, or Benchmark-1 compound were subcutaneously administered to mice (n=5/group) on days 0, 3, and 6. On days 3 and 9, three days after the first injection and multiple (3) injections, respectively, peripheral blood was collected. Based on earlier in vivo experiments, Treg cell activation, proliferation, and expansion were expected to peak on day 3, and thus three days post injection was selected for data collection and analysis. Changes in blood lymphocyte activation, proliferation, and expansion were measured by flow cytometry. P-0531 is the S125I equivalent of the wild type IL-2 fusion protein. The Benchmark-1 contains V91K mutation.

[0272] Three days following a single subcutaneous administration of IL-2 fusion proteins, near 90% of Treg cells showed positive Ki67 expression in all tested groups and the Ki67 positive cells remained significantly high after receiving the 3rd dose of all tested compounds (FIG. 20A). Intriguingly, Treg cells, as expressed by % Treg over total CD4 T cells or over total lymphocytes, declined drastically to near control levels in mice treated with P-0531 and Benchmark-1, while sustained at significantly high levels in mice treated with P-0511 and P-0512 after three consecutive Q3D treatments in comparison with one treatment (FIGS. 20B-20C). Data suggest that wild type IL-2 or Benchmark-1 may accelerate the exhaustion of Treg cells or precipitate desensitization of Treg due to stronger potency on Treg stimulation. Additional explanations may also include differences in half-life or “receptor sink” on non-lymphocytes leading to altered drug exposure for non- or less-Treg selective wild type IL-2 or Benchmark-1.

[0273] Similar observations were also obtained for Treg cell counts and fold changes relative to PBS control (FIGS. 21A-21B), as well as Treg/Tconv ratio (FIG. 22). P-0511 and P-0512 demonstrated superior capabilities to sustain Treg pool and maintain Treg selectivity compared to P-0531 and Benchmark-1.

[0274] Overall the data illustrated that P-0511 and P-0512 are superior IL-2 molecules that show preferential and sustained in vivo Treg expansion after multiple doses. Tuning the dosing regimen of IL-2 variant Fc fusions, e.g., dosing amount and frequency, may further optimize the desired potency and selectivity on Treg over proinflammatory immune activation.

### Example 12

### Suppression of Antigen-Driven Inflammation by IL-2 Variant Fc Fusion Protein in a Delayed-Type Hypersensitivity (DTH) Mouse Model

[0275] The ability of Treg cells induced by IL-2 variants to suppress T cell antigen-driven inflammation in vivo was assessed in a model of delayed-type hypersensitivity (DTH). Female Balb/C mice (7-week old) were acclimated in house for 7 days and randomized into groups. Subcutaneous administration of vehicle (PBS), P-0511 at either 0.1 mg/kg or 0.3 mg/kg was initiated on day −2 and was given either once every 3 days (Q3D) for three injections or once every 5 days (Q5D) for two injections. Mice were then sensitized with a subcutaneous administration of 100 μg keyhole limpet hemocyanin (KLH) in 200 μl saline on day 0. For Q3D dosing, two more subcutaneous injections of PBS or P-0511 (0.1 or 0.3 mg/kg) were administered on days 1, and 4; for Q5D dosing, one additional s.c. injection of PBS, 0.1 or 0.3 mg/kg P-0511 was administered on day 3. Mice received an intradermal challenge of KLH (5 μg in 10 μl saline) in right ear on day 5. Right ear thickness was measured using a caliper on day 5 prior KLH challenge and daily from day 6 to day 9 corresponding to 24 h, 48 h, 72 h and 96 h post KLH challenge. One group of mice also received 5 mg/kg daily i.p. treatment of dexamethasone from day 5 to day 8 as a positive control.

[0276] Kinetics of the DTH response using the change in ear thickness relative to baseline values (Δ ear thickness) at various times after KLH challenge was illustrated in FIG. 23.

[0277] A pronounced ear inflammation and swelling was peaked 24 post intradermal KLH challenge of the ear pinna following subcutaneous KLH antigen sensitization and the ear swelling prolonged for 72 hours in PBS group. It is evident that the immune suppressive steroid dexamethasone is potent in inhibiting KLH-induced inflammatory response, reaching ˜85% inhibition 72 hours after KLH challenge with 4 consecutive daily dosing at 5 mg/kg. Suppression of antigen-driven inflammation by Treg cells induced by P-0511 was also evident in mice treated with 0.3 mg/kg P-0511 either Q3D or Q5D at all time points post KLH challenge (FIGS. 23A-23B). At 0.1 mg/kg dosing, a similar trend of alleviating the DTH inflammatory response was observed for both Q3D and Q5D administration, but the effect did not reach statistical significance at most of the time points. Both Q3D and Q5D dosing schedules were effective.

[0278] In a separate study, dose-dependent response effect of P-0511 (0.1, 0.3 and 1 mg/kg, Q5D) on suppression of KLH-induced DTH was determined and compared with Benchmark-1 (0.3 mg/kg, Q5D). As illustrated in FIG. 24, P-0511 demonstrated dose-dependent inhibition of ear inflammation. Mice receiving 1 mg/kg P-0511 demonstrated strong resistance to KLH-induced DTH and minimal ear swelling was observed following KLH challenge. Intermediate and mild inhibitory effect was observed for 0.3 mg/kg and 0.1 mg/kg of P-0511, respectively. Benchmark-1 showed mild inhibition of ear swelling and the effect of 0.3 mg/kg benchmark was similar to that achieved by 0.1 mg/kg P-0511 (FIG. 24).

[0279] In summary, Treg cells induced by P-0511 administration was efficacious in suppressing T cell antigen-driven inflammation in a DTH model. Additionally, Treg suppression was sustained without repeated dosing after KLH challenge. It was also evident from the example that it is critical to tune the dosing regimen to achieve optimal efficacy.

### Example 13

### IL-2 Variants Exhibited Reduced/Abolished Binding to IL-2 Receptor Subunit a for Cancer Indications

[0280] P-0613 and P-0573 are two exemplary IL-2 variant Fc fusion proteins. P-0613 contains F42A amino acid substitution and P-0573 comprises R38A/P65G dual amino acid changes. F42, R38, and P65 are all at the interface with IL-2Rα, forming either hydrophobic interactions or salt bridges with multiple IL-2Rα residues (Mathias Rickert, et al. (2005) Science 308, 1477-80). Mutations of these residues are expected to disrupt interaction with IL-2Rα and resulted in IL-2 variants with reduced or abolished binding to IL-2 Ra. In addition, both P-0613 and P-0573 contain S125I substitution, which was demonstrated to significantly improve developability profiles of IL-2 Fc fusion molecules with fully retained biological activity. The binding activity of P-0613 and P-0573 to IL-2Rα was determined by enzyme-linked immunosorbent assay (ELISA) in comparison to P-0531 and Benchmark-4. P-0531 is the S125I equivalent of wild-type IL-2 Fc fusion protein while Benchmark-4 contains IL-2Rα-disrupting triple mutations F42A/Y45A/L72G.

[0281] Briefly, IL-2Rα-ECD (SinoBiological) was coated onto the wells of Nunc Maxisorp 96-well microplates at 1 μg/well. After overnight incubation at 4° C. and blocking with superblock (ThermoFisher), 3-fold serial dilutions of IL-2 Fc fusion proteins starting at 100 nM were added to each well at 100 μl/well. Following a one-hour incubation at room temperature, 100 μl/well of goat anti-human IgG Fc-HRP (1:5000 diluted in diluent) were added to each well and incubated at room temperature for 1 hour. Wells were thoroughly aspirated and washed three times with PBS/0.05% Tween-20 following each step. Finally, 100 μl TMB substrate was added to each well; the plate was developed at room temperature in the dark for 10 minutes, and 100 μl/well of stop solution (2N Sulfuric acid, Ricca Chemical) was added. Absorbance was determined at 450 nm and curves were fit using Prism software (GraphPad).

### Example 14

### IL-2 Variant Fc Fusion Protein with Reduced Tregs Activation in Ex Vivo Functional Assay for Cancer Indications

[0282] Exemplary IL-2 variant Fc fusion proteins were subsequently characterized in functional assay using fresh human peripheral blood mononuclear cell (PBMC). P-0573 and P-0613 were examined for their ability to differentially stimulate STAT5 phosphorylation in CD4+Treg cells, CD4+ Tconv cells, CD8+ T cells, and NK cells in comparison with P-0531 and Benchmark-4. STAT5 is known to be involved in the downstream signaling cascade upon IL-2 binding to the transmembrane IL-2 receptors. The phosphorylation of STAT5 in lymphocyte subpopulations was measured using fresh human peripheral blood mononuclear cells (PBMC) and the forkhead transcription factor FOXP3 was used to identify the Treg population in FACS analysis.

[0283] Exemplary IL-2 variant Fc fusion protein P-0573 was further characterized for induction of Ki-67 expression by flow cytometry. Dose-dependent increases of Ki67 expression on human CD4+ T cells, CD8+ T cells, and NK cells responding to P-0573 were compared to P-0531 and Benchmark-4.

[0284] As demonstrated in FIGS. 25B and 25C, P-0573 and Benchmark-4 were equally effective in inducing Ki67 expression in NK and CD8+ T cells. For CD4+ T cells (FIG. 25A), while P-0573 exhibited substantially reduced potency as compared to wild-type P-0531, it showed higher potency than Benchmark-4. This was likely due to the residual binding of P-0573 to IL-2Rα that resulted in Tregs still being preferentially activated, albeit at a reduced level. To achieve the desired property of Tregs being activated only at the concentration when CD8C T and NK cells were also activated, more mutations that disrupt the binding of IL-2 to IL-2Rα, including but not limit to the mutations listed in Table 4F, can be further incorporated and combined.

### Example 15

### Generation of Bifunctional IL-2 Variant Fusion Proteins

[0285] The use of recombinant antibody-cytokine fusion proteins (immunocytokines) promises to enhance the therapeutic index of cytokines by targeting them to the site of disease. Delivering an IL-2 variant that preferentially expands Treg cells at the intended site of therapy has the potential to further enhance existing responses of therapies for various autoimmune and inflammatory diseases

[0286] Following this concept, antibody-IL-2 fusion proteins that build on IL-2 variants with biased selectivity for Treg lymphocyte subset were constructed. Exemplary targets include but are not limited to integrin α4β7, β7, MAdCAM-1, BAFF, TNFα, and IL-6Rα. As can be appreciated by skilled artisan, any IL-2 variants with biased selectivity for Treg disclosed in the current invention can be used as a building block to construct bifunctional fusion proteins to potentiate or augment antibody-based therapies for autoimmune diseases or inflammatory conditions.

[0287] The present invention disclosed a variety of Treg-selective IL-2 variants of a wide spectrum of potency levels. The present inventors propose that the use of IL-2 variants with attenuated activity is likely to facilitate the establishment of stoichiometric balance between the cytokine and antibody arms. Further, cytokine activity attenuation is expected to minimize peripheral activation, mitigate antigen-sink, and promote disease tissue targeting via the antibody arm.

[0288] Exemplary bifunctional constructs building on anti-inflammatory antibodies and Treg cell-selective IL-2 variants are listed in Table 8.

TABLE 8
Exemplary bifunctional constructs building on anti-inflammatory antibodies and Treg cell-selective IL-2 variants

| | | | SEQ ID NOs | | |
|---|---|---|---|---|---|
| | Exemplary | | of the chains of | | |
| Targets | antibody | IL-2 mutations | bifunctional constructs | IL-2 valency | Protein ID |
| α4β7 | Vedolizumab | L19H/S125I/Q126E | 200 + 201 | Bivalent | P-0618 |
| β7 | Etrolizumab | L19H/S125I/Q126E | 206 + 207 | Bivalent | P-0619 |
| MAdCAM | PF-00547659 | L19H/S125I/Q126E | 204 + 205 | Bivalent | P-0620 |
| TNFα | Adalimumab | L19H/S125I/Q126E | 202 + 203 | Bivalent | P-0621 |
| IL-6 Rα | Tocilizumab | L19H/S125I/Q126E | 253 + 255 | Bivalent | P-0536 |
| | | | 253 + 254 + 256 | Monovalent | P-0546 |
| | | D20Q/S125I | 253 + 265 | Bivalent | P-0559 |
| | | | 253 + 254 + 266 | Monovalent | P-0560 |
| | | D20T/S125I | 253 + 259 | Bivalent | P-0617 |
| | | | 253 + 254 + 260 | Monovalent | P-0587 |
| | | D20T/S125I/Q126E | 253 + 261 | Bivalent | P-0561 |
| | | | 253 + 254 + 262 | Monovalent | P-0563 |
| | | D20T/S125I/Q126K | 253 + 263 | Bivalent | P-0562 |
| | | | 253 + 254 + 264 | Monovalent | P-0564 |
| | | D20S/S125I | 253 + 257 | Bivalent | P-0588 |
| | | D20N/S125I | 253 + 258 | Bivalent | P-0589 |
| | | L19N/S125I/Q126E | 253 + 267 | Bivalent | P-0590 |
| | | L19N/S125I/Q126K | 253 + 268 | Bivalent | P-0591 |
| | | L19H/S125I/Q126D | 253 + 308 | Bivalent | P-0694 |
| | | L19H/S125I/Q126H | 253 + 309 | Bivalent | P-0695 |
| | | L19H/S125I/Q126N | 253 + 310 | Bivalent | P-0697 |
| | | L19H/S125I/Q126R | 253 + 311 | Bivalent | P-0698 |
| | | L19H/S125I/Q126S | 253 + 312 | Bivalent | P-0699 |
| | | L19H/S125I/Q126T | 253 + 307 | Bivalent | P-0700 |
| BAFF | Belimumab | L19H/S125I/Q126E | 269 + 271 | Bivalent | P-0649 |
| | | D20Q/S125I | 269 + 272 | Bivalent | P-0650 |
| | | | 269 + 270 + 273 | Monovalent | P-0651 |
| | | L19R/S125I/Q126K | 269 + 270 + 274 | Monovalent | P-0652 |

[0289] In addition to antibodies, the IL-2 variants of the present invention can be attached to a protein that functions as the targeting moiety, such as TACI. TACI, transmembrane activator and CAML-interactor, is a membrane bound receptor and a member of the tumor necrosis factor receptor (TNFR) family (von Büllow and Bram, Science 228:138 (1997); Bram and von Bülow, U.S. Pat. No. 5,969,102 (1999)). TACI has an extracellular domain (SEQ ID NO: 313) containing two cysteine-rich pseudo-repeats, a transmembrane domain and a cytoplasmic domain that interacts with calcium-modulator and cyclophilin ligand (CAML). The TACI receptor is associated with B cells and a subset of T cells. It binds two members of the tumor necrosis factor (TNF) ligand family. One ligand is BAFF or BLyS, and the other ligand has been designated as APRIL.

[0290] Following the similar concept of antibody-IL-2 fusions, TACI-IL-2 fusion molecules that build on IL-2 variants with biased selectivity for Treg lymphocyte subset were constructed. As can be appreciated by skilled artisan, any IL-2 variants and constructs with biased selectivity for Treg cells disclosed in the current invention (summarized in Table 4) can be used as the building block to construct bifunctional fusion proteins to potentiate or augment antibody-based therapies for autoimmune diseases or inflammatory conditions. TACI can be the mature form of the entire mature extracellular domain (amino acid 30-165 of SEQ ID NO: 313) or any functional fragment thereof (e.g., SEQ ID NO: 314). To facilitate expression/purification and enhance in vivo half life, an Fc domain is linked between TACI and IL-2 variant. The Fc domain can be homodimer or heterodimer, with reduced/abolished functional activity and/or further extended half life. TACI can be at the N-terminus or C-terminus of the Fc domain, and likewise for IL-2 variant. The linker can be flexible or rigid of 1-100 amino acids, natural or mutated immunoglobulin hinge sequence, and any of the linker peptides listed in Table 5 (SEQ ID NOS: 48-67).

[0291] Exemplary bifunctional constructs building on TACI are listed in Table 9.

TABLE 9
Exemplary bifunctional constructs building on
TACI and Treg cell-selective IL-2 variants

| | SEQ ID NO. of |
|---|---|
| IL-2 mutations | bifunctional constructs |
| L19H/S125I/Q125D | 315 |
| L19N/S125I/Q125E | 316 |
| L19R/S125I/Q125E | 317 |
| L19D/S125I/Q126E | 318 |
| D20Q/S125I | 319 |
| L19H/S125I/Q125E + | 320 |
| 9-aa N-terminal deletion | |

[0292] Similarly, IL-2 variants engineered to preferentially expand and activate Teff cells while reducing Treg cell expansion and activation can be used as a building block to construct bifunctional fusion proteins to augment cancer therapy. In addition to tumor-targeting antibodies, immune checkpoint blocking antibodies that bypass the immunosuppressive effects in the tumor microenvironment or immune-stimulatory antibodies to potentiate existing responses can also be fused to IL-2 variants to achieve further enhancement of the immune system's activity against tumors.

[0293] Exemplary immune checkpoint blocking antibodies include but are not limited to PD-1/PD-L1 blocking antibody JS-001, anti-CTLA4 antibody ipilimumab, and agonistic CD40 antibody R07009789. Exemplary tumor-antigen-targeting antibodies include but are not limited to L19 directed against the extra-domain of fibronectin, rituximab directed against CD20, Herceptin directed against Her-2, and Cetuximab directed against EGFR.

### Example 16

### Confirmation of the Treg Cell Selectivity by IL-2 Variants in Various Bifunctional Constructs

[0294] A few exemplary IL-2 variant tocilizumab bifunctional fusion proteins were examined for their ability to differentially stimulate STAT5 phosphorylation in CD4 positive Treg and Tconv cells. The phosphorylation of STAT5 in defined lymphocyte subpopulations was measured using fresh human PBMC by FACS analysis as described in earlier examples.

[0295] FIG. 26 shows the dose-response effects of exemplary tocilizumab IL-2 variants bifunctional fusions on STAT5 phosphorylation in CD4+ Treg and Tconv cells. Both P-0536 (SEQ ID NOS: 253 & 255) and P-0546 (SEQ ID NOS: 253, 254, & 256) contain IL-2 harboring L19H/S125I/Q126E mutations; P-0536 contains bivalent IL-2 variant at the C-terminal of tocilizumab heavy chains while P-0546 comprises monomeric IL-2 variant linked to the knob-containing heterodimeric heavy chain. P-0559 (SEQ ID NOS: 253 & 265) and P-560 (SEQ ID NOS: 253, 254, & 266) are bivalent and monovalent IL-2 variant bifunctional counterparts, respectively, comprising IL-2 with D20Q/S125I mutations. P-0511, an IL-2 variant Fc fusion protein with L19H/S125I/Q126E mutations in IL-2, was included for comparison purposes.

[0296] FIG. 3 shows the ability of IL-2 variant P-0375 (N88Q) to induce STAT5 phosphorylation in CD4 positive Treg and CD4+ Tconv cells in comparison with Benchmark-1 and Benchmark-2 compounds harboring V91K and N88R mutations, respectively. The activity profile of the N88Q variant was similar to that of Benchmark-2.

[0297] P-0536 and P-0546 demonstrated similar activity profile as P-0511 in inducing STAT5 phosphorylation in Treg and Tconv cells (FIGS. 26A and 26B). As expected, the dimeric bifunctional fusion P-0536 exhibited slightly higher activity than its monomeric equivalent P-0546, which was likely due to avidity effect. These results suggested that the antibody IL-2 variant fusions retained the activity and selectivity of their Fc fusion counterparts.

[0298] P-0559 and P-0560 also demonstrated selective activation of Treg cells over CD4+ Tconv cells (FIGS. 26A and 26B). Compared to P-0511, P-0559 exhibited reduced potency in inducing STAT5 phosphorylation in Treg cells but such activity was essentially abolished in CD4+ Tconv cells, resulting in a wide selectivity window. Intriguingly, the dimeric bifunctional fusion P-0559 exhibited reduced Treg induction potency than its monomeric equivalent P-0560 (EC₅₀ of 146 nM and 12.1 pM, respectively).

[0299] Additional IL-2 variant tocilizumab bifunctional fusion proteins, exemplified by P-0588 (D20S/S125I), P-0589 (D20N/S125I), and P-0590 (L19N/S125I/Q126E), demonstrated similar activity profile as P-0559, namely reduced potency in inducing STAT5 phosphorylation in Treg cells but a wider selectivity window over conventional CD4+ T cells (FIGS. 26C and 26D). Further, P-0590 induced lower signaling amplitude, resembled partial agonist property of its Fc fusion counterpart P-0859 (FIG. 6E).

[0300] Further, potency attenuation and selectivity for Treg cells can also be achieved by different amino acid substitutions at position Q126, which is integral to γc interaction. A few IL-2 variant tocilizumab bifunctional fusion proteins were constructed and assessed in pSTAT assay. These compounds all share the same L19H/S125 mutations as in P-0536, the substitutions at Q126 position are Q126D, Q126H, Q126N, Q126R, Q126S, and Q126T in P-0694, P-0695, P-0697, P-0698, P-0699, and P-0700, respectively, while P-0536 comprises Q126E substitution. As demonstrated in FIGS. 26E and 26F, with the exception of Q126D in P-0694, all other substitutions tested did not impair the protein activity nor improve the Treg selectivity. Similar to P-0559, P-0694 exhibited reduced potency in inducing STAT5 phosphorylation in Treg cells but such activity was essentially abolished in CD4+ Tconv cells, resulting in a wide selectivity window (FIGS. 26E and 26F). Consequently, Q126D substitutions could be combined with various Rβ-disrupting mutations disclosed in this invention to further fine tune the activity to achieve the desired potency, singling strength, and biased specificity for Treg cells.

### Example 17

### IL-2 Variants Bifunctional Constructs Preferentially Proliferate and Expand Treg Cells in Mice

[0301] IL-2 variant tocilizumab bifunctional proteins P-0536, P-0546, P-0559, and P-0560 along with IL-2 variant Fc fusion protein P-0511 were administered to mice, and their ability to preferentially proliferate and expand regulatory T cells (CD4+CD25+FoxP3+ T cells) over effector T cells and NK cells were determined in vivo. As tocilizumab does not have species cross reactivity to mouse IL-6Rα, this in vivo experiment aimed to phenotype the cell responses to IL-2 variants with different mutations and valencies in the bifunctional construct context.

[0302] Female C57/BL6 mice (7-week old) were received from Charles River Laboratory and acclimated in house for at least 7 days before the study. Vehicle (PBS) and 15 nmol/kg each test compounds were subcutaneously administered to mice on day 0. Peripheral blood samples were collected into heparin-treated tubes on days 2, 4 and 8 post-treatment. Each group contained 5 mice and baseline blood was collected 3 days prior to the treatment (day −3).

[0303] All tested IL-2 compounds stimulated Treg cell proliferation and expansion as demonstrated by increased Ki67 positive Treg cells and elevated percentage of Treg over total CD4+ T cells or total lymphocytes (FIGS. 27A-27C). The increase in Ki67 expression was observed 2 days post injection and peaked on day 4 following one single injection. At dose concentration of 15 nmol/kg, or 1.2-2.7 mg/kg depends on the molecular weight of each compound, Ki67 expression on Treg cells increased to 100% on day 4 for all tested IL-2 compounds. Treg cell expansion was not observed on day 2 but became profound on day 4; Treg cells accounted for as much as 40% of the CD4+ T cell subpopulation and 12% of the total lymphocytes after IL-2 compounds stimulation. In contrast to ex vivo observations, the two monomeric IL-2 variant bifunctional molecules, P-0546 and P-0560, exhibited the highest potency in inducing Treg cell proliferation and expansion. However, the relative in vivo potency ranking between P-0546 and P-0560 and their dimeric counterparts P-0536 and P-559, respectively, agreed with the ex vivo human PBMC cell assay. Further, IL-2 variant Fc fusion P-0511 exhibited comparable in vivo Treg stimulation efficacy as P-0560, despite being over 100-fold more potent in ex vivo cell assay.

[0304] All tested IL-2 compounds also showed Ki67 stimulation on CD4+ Tconv (CD4+Foxp3-), activated CD4+T (CD4+CD25+Foxp3−) and CD8+ T, and NK cells (FIGS. 28A-28D). The relative potency ranking between different compounds followed the same trend as observed for Treg cells in the same group of treated mice. No significant expansion of CD4+ Tconv cells, CD8 T cells or NK cells was observed in mice treated with any of the tested IL-2 compounds (FIGS. 29A, 29C-D). There was some slight increase of the activated CD4+ T cells in response to the most potent compounds, P-0546 and P-0560 (FIG. 29B) due to the induced expression of IL-2Rα on this T cell subset.

[0305] All IL-2 variant bifunctional compounds also exhibited beneficial Treg/Tconv ratio both in terms of Ki67 stimulation and cell expansion based on the cell counts (FIGS. 30A and 30B). They also showed high expression of CD25 and Foxp3 and CD25 markers (FIGS. 31A and 31B). Among the four bifunctional compounds, P-0546 and P-0560 consistently demonstrated the highest potency in stimulating Treg cell proliferation and expansion, the most beneficial Treg/Tconv ratio based on the cell counts suggesting, and the highest expression of CD25 on Treg cells, suggesting superior Treg activation and functionality. These compounds may serve as therapeutic agents to combat autoimmune and inflammatory diseases as well as rejection of organ transplantation.

[0306] All of the articles and methods disclosed and claimed herein can be made and executed without undue experimentation in light of the present disclosure. While the articles and methods of this disclosure have been described in terms of preferred embodiments, it will be apparent to those of skill in the art that variations may be applied to the articles and methods without departing from the spirit and scope of the disclosure. All such variations and equivalents apparent to those skilled in the art, whether now existing or later developed, are deemed to be within the spirit and scope of the disclosure as defined by the appended claims. All patents, patent applications, and publications mentioned in the specification are indicative of the levels of those of ordinary skill in the art to which the disclosure pertains. All patents, patent applications, and publications are herein incorporated by reference in their entirety for all purposes and to the same extent as if each individual publication was specifically and individually indicated to be incorporated by reference in its entirety for any and all purposes. The disclosure illustratively described herein suitably may be practiced in the absence of any element(s) not specifically disclosed herein. Thus, it should be understood that although the present disclosure has been specifically disclosed by preferred embodiments and optional features, modification and variation of the concepts herein disclosed may be resorted to by those skilled in the art, and that such modifications and variations are considered to be within the scope of this disclosure as defined by the appended claims.

### Sequence Listings

[0307] The nucleic and amino acid sequences listed in the accompanying sequence listing are shown using standard letter abbreviations for nucleotide bases and one letter codes for amino acids, as defined in 37 C.F.R. 1.822.

[0308] SEQ ID NO: 1 is a human IL-2 precursor amino acid sequence.

[0309] SEQ ID NO: 2 is a human IL-2 mature form naturally occurring amino acid sequence.

[0310] SEQ ID NO: 3 is a human IL-2 mature form wild type amino acid sequence.

[0311] SEQ ID NOS: 4-43, 113-151, 208-212, and 275-292 are the amino acid sequences of various IL-2 variants for preferential Treg activation.

[0312] SEQ ID NO: 44 is a human IgG1-Fc amino acid sequence.

[0313] SEQ ID NO: 45 is a human IgG1-Fc with reduced/abolished effector function sequence.

[0314] SEQ ID NO: 46 is a Knob-Fc amino acid sequence.

[0315] SEQ ID NO: 47 is a Hole-Fc amino acid sequence.

[0316] SEQ ID NOS: 48-67 are the amino acid sequences of various peptide linker sequences.

[0317] SEQ ID NO: 68 is a human IL-2 receptor alpha Sushi domain amino acid sequence.

[0318] SEQ ID NOS: 69-70 and 196-197 are amino acid sequences of IL-2 and IL-2RSushi Fc fusion proteins.

[0319] SEQ ID NOS: 71 and 72 are amino acid sequences of wild type IL-2 Fc fusion proteins SEQ ID NOS: 73-112, 152-194, 213-219, and 300-306 are the amino acid sequences of various IL-2 Fc fusion proteins for preferential Treg activation.

[0320] SEQ ID NOS: 195, and 198-199 are the amino acid sequences of benchmark Fc-IL-2 variant fusion proteins for preferential Treg activation.

[0321] SEQ ID NOS: 200-207 are the amino acid sequences of various antibody IL-2 variant fusion constructs.

[0322] SEQ ID NOS: 220-234 and 293-299 are the amino acid sequences of various IL-2 variants for reduced Treg activation.

[0323] SEQ ID NOS: 235-249 are the amino acid sequences of various Fc-IL-2 fusion proteins for reduced Treg activation.

[0324] SEQ ID NO: 250 is the amino acid sequence of benchmark Fc-IL-2 variant fusion protein for reduced Treg activation.

[0325] SEQ ID NO: 251-252 are human IgG1-Fc sequences with reduced/abolished effector function and extended half-life.

[0326] SEQ ID NOS: 253-268 are the amino acid sequences of various Tocilizumab-IL-2 variants bifunctional constructs.

[0327] SEQ ID NOS: 269-274 and 307-312 are the amino acid sequences of various Belimumab-IL-2 variants bifunctional constructs.

[0328] SEQ ID NO: 313 is the amino acid sequence of TACI extracellular domain

[0329] SEQ ID NO: 314 is the amino acid sequence of a functional TACI ECD fragment.

[0330] SEQ ID NOS: 315-320 are the amino acid sequences of various TACI-IL-2 variants bifunctional constructs.

SEQUENCE LISTINGS
Human IL-2 precursor sequence
(SEQ ID NO: 1)
MYRMQLLSCIALSLALVINSAPTSSSTKKTQLQLEHLLLDLQMILNGINNYKNPKLTRMLTFKFY
MPKKATELKHLQCLEEELKPLEEVLNLAQSKNFHLRPRDLISNINVIVLELKGSETTFMCEYADE
TATIVEFLNRWITFCQSIISTLT
Human IL-2 mature form naturally occurring sequence
(SEQ ID NO: 2)
APTSSSTKKTQLQLEHLLLDLQMILNGINNYKNPKLTRMLTFKFYMPKKATELKHLQCLEEELKP
LEEVLNLAQSKNFHLRPRDLISNINVIVLELKGSETTFMCEYADETATIVEFLNRWITFCQSIIS
TLT
Human IL-2 mature form wild-type sequence
(SEQ ID NO: 3)
APTSSSTKKTQLQLEHLLLDLQMILNGINNYKNPKLTRMLTFKFYMPKKATELKHLQCLEEELKP
LEEVLNLAQSKNFHLRPRDLISNINVIVLELKGSETTFMCEYADETATIVEFLNRWITFSQSIIS
TLT
IL-2 N88R variant sequence
(SEQ ID NO: 4)
APTSSSTKKTQLQLEHLLLDLQMILNGINNYKNPKLTRMLTFKFYMPKKATELKHLQCLEEELKP
LEEVLNLAQSKNFHLRPRDLISRINVIVLELKGSETTFMCEYADETATIVEFLNRWITFSQSIIS
TLT
IL-2 D20T variant sequence
(SEQ ID NO: 5)
APTSSSTKKTQLQLEHLLLTLQMILNGINNYKNPKLTRMLTFKFYMPKKATELKHLQCLEEELKP
LEEVLNLAQSKNFHLRPRDLISNINVIVLELKGSETTFMCEYADETATIVEFLNRWITFSQSIIS
TLT
IL-2 D20E variant sequence
(SEQ ID NO: 6)
APTSSSTKKTQLQLEHLLLELQMILNGINNYKNPKLTRMLTFKFYMPKKATELKHLQCLEEELKP
LEEVLNLAQSKNFHLRPRDLISNINVIVLELKGSETTFMCEYADETATIVEFLNRWITFSQSIIS
TLT
IL-2 D20N variant sequence
SEQ ID NO: 7)
APTSSSTKKTQLQLEHLLLNLQMILNGINNYKNPKLTRMLTFKFYMPKKATELKHLQCLEEELKP
LEEVLNLAQSKNFHLRPRDLISNINVIVLELKGSETTFMCEYADETATIVEFLNRWITFSQSIIS
TLT
IL-2 D20Q variant sequence
(SEQ ID NO: 8)
APTSSSTKKTQLQLEHLLLQLQMILNGINNYKNPKLTRMLTFKFYMPKKATELKHLQCLEEELKP
LEEVLNLAQSKNFHLRPRDLISNINVIVLELKGSETTFMCEYADETATIVEFLNRWITFSQSIIS
TLT
IL-2 D20S variant sequence
(SEQ ID NO: 9)
APTSSSTKKTQLQLEHLLLSLQMILNGINNYKNPKLTRMLTFKFYMPKKATELKHLQCLEEELKP
LEEVLNLAQSKNFHLRPRDLISNINVIVLELKGSETTFMCEYADETATIVEFLNRWITFSQSIIS
TLT
IL-2 D20Y variant sequence
(SEQ ID NO: 10)
APTSSSTKKTQLQLEHLLLYLQMILNGINNYKNPKLTRMLTFKFYMPKKATELKHLQCLEEELKP
LEEVLNLAQSKNFHLRPRDLISNINVIVLELKGSETTFMCEYADETATIVEFLNRWITFSQSIIS
TLT
IL-2 D20I variant sequence
(SEQ ID NO: 11)
APTSSSTKKTQLQLEHLLLILQMILNGINNYKNPKLTRMLTFKFYMPKKATELKHLQCLEEELKP
LEEVLNLAQSKNFHLRPRDLISNINVIVLELKGSETTFMCEYADETATIVEFLNRWITFSQSIIS
TLT
IL-2 L19Y variant sequence
(SEQ ID NO: 12)
APTSSSTKKTQLQLEHLLYDLQMILNGINNYKNPKLTRMLTFKFYMPKKATELKHLQCLEEELKP
LEEVLNLAQSKNFHLRPRDLISNINVIVLELKGSETTFMCEYADETATIVEFLNRWITFSQSIIS
TLT
IL-2 L19N variant sequence
(SEQ ID NO: 13)
APTSSSTKKTQLQLEHLLNDLQMILNGINNYKNPKLTRMLTFKFYMPKKATELKHLQCLEEELKP
LEEVLNLAQSKNFHLRPRDLISNINVIVLELKGSETTFMCEYADETATIVEFLNRWITFSQSIIS
TLT
IL-2 L19R variant sequence
(SEQ ID NO: 14)
APTSSSTKKTQLQLEHLLRDLQMILNGINNYKNPKLTRMLTFKFYMPKKATELKHLQCLEEELKP
LEEVLNLAQSKNFHLRPRDLISNINVIVLELKGSETTFMCEYADETATIVEFLNRWITFSQSIIS
TLT
IL-2 N88G variant sequence
(SEQ ID NO: 15)
APTSSSTKKTQLQLEHLLLDLQMILNGINNYKNPKLTRMLTFKFYMPKKATELKHLQCLEEELKP
LEEVLNLAQSKNFHLRPRDLISGINVIVLELKGSETTFMCEYADETATIVEFLNRWITFSQSIIS
TLT
IL-2 N88I variant sequence
(SEQ ID NO: 16)
APTSSSTKKTQLQLEHLLLDLQMILNGINNYKNPKLTRMLTFKFYMPKKATELKHLQCLEEELKP
LEEVLNLAQSKNFHLRPRDLISIINVIVLELKGSETTFMCEYADETATIVEFLNRWITFSQSIIS
TLT
IL-2 N88Q variant sequence
(SEQ ID NO: 17)
APTSSSTKKTQLQLEHLLLDLQMILNGINNYKNPKLTRMLTFKFYMPKKATELKHLQCLEEELKP
LEEVLNLAQSKNFHLRPRDLISQINVIVLELKGSETTFMCEYADETATIVEFLNRWITFSQSIIS
TLT
IL-2 N88E variant sequence
(SEQ ID NO: 18)
APTSSSTKKTQLQLEHLLLDLQMILNGINNYKNPKLTRMLTFKFYMPKKATELKHLQCLEEELKP
LEEVLNLAQSKNFHLRPRDLISEINVIVLELKGSETTFMCEYADETATIVEFLNRWITFSQSIIS
TLT
IL-2 N88T variant sequence
(SEQ ID NO: 19)
APTSSSTKKTQLQLEHLLLDLQMILNGINNYKNPKLTRMLTFKFYMPKKATELKHLQCLEEELKP
LEEVLNLAQSKNFHLRPRDLISTINVIVLELKGSETTFMCEYADETATIVEFLNRWITFSQSIIS
TLT
IL-2 N88M variant sequence
(SEQ ID NO: 20)
APTSSSTKKTQLQLEHLLLDLQMILNGINNYKNPKLTRMLTFKFYMPKKATELKHLQCLEEELKP
LEEVLNLAQSKNFHLRPRDLISMINVIVLELKGSETTFMCEYADETATIVEFLNRWITFSQSIIS
TLT
IL-2 Q126E variant sequence
(SEQ ID NO: 21)
APTSSSTKKTQLQLEHLLLDLQMILNGINNYKNPKLTRMLTFKFYMPKKATELKHLQCLEEELKP
LEEVLNLAQSKNFHLRPRDLISNINVIVLELKGSETTFMCEYADETATIVEFLNRWITFSESIIS
TLT
IL-2 Q126L variant sequence
(SEQ ID NO: 22)
APTSSSTKKTQLQLEHLLLDLQMILNGINNYKNPKLTRMLTFKFYMPKKATELKHLQCLEEELKP
LEEVLNLAQSKNFHLRPRDLISNINVIVLELKGSETTFMCEYADETATIVEFLNRWITFSLSIIS
TLT
IL-2 Q126N variant sequence
(SEQ ID NO: 23)
APTSSSTKKTQLQLEHLLLDLQMILNGINNYKNPKLTRMLTFKFYMPKKATELKHLQCLEEELKP
LEEVLNLAQSKNFHLRPRDLISNINVIVLELKGSETTFMCEYADETATIVEFLNRWITFSNSIIS
TLT
IL-2 Q126D variant sequence
(SEQ ID NO: 24)
APTSSSTKKTQLQLEHLLLDLQMILNGINNYKNPKLTRMLTFKFYMPKKATELKHLQCLEEELKP
LEEVLNLAQSKNFHLRPRDLISNINVIVLELKGSETTFMCEYADETATIVEFLNRWITFSDSIIS
TLT
IL-2 Q126M variant sequence
(SEQ ID NO: 25)
APTSSSTKKTQLQLEHLLLDLQMILNGINNYKNPKLTRMLTFKFYMPKKATELKHLQCLEEELKP
LEEVLNLAQSKNFHLRPRDLISNINVIVLELKGSETTFMCEYADETATIVEFLNRWITFSMSIIS
TLT
IL-2 D20I/N88G variant sequence
(SEQ ID NO: 26)
APTSSSTKKTQLQLEHLLLILQMILNGINNYKNPKLTRMLTFKFYMPKKATELKHLQCLEEELKP
LEEVLNLAQSKNFHLRPRDLISGINVIVLELKGSETTFMCEYADETATIVEFLNRWITFSQSIIS
TLT
IL-2 D20I/N88R variant sequence
(SEQ ID NO: 27)
APTSSSTKKTQLQLEHLLLILQMILNGINNYKNPKLTRMLTFKFYMPKKATELKHLQCLEEELKP
LEEVLNLAQSKNFHLRPRDLISRINVIVLELKGSETTFMCEYADETATIVEFLNRWITFSQSIIS
TLT
IL-2 D20T/N88R variant sequence
(SEQ ID NO: 28)
APTSSSTKKTQLQLEHLLLTLQMILNGINNYKNPKLTRMLTFKFYMPKKATELKHLQCLEEELKP
LEEVLNLAQSKNFHLRPRDLISRINVIVLELKGSETTFMCEYADETATIVEFLNRWITFSQSIIS
TLT
IL-2 D20I/N88I variant sequence
(SEQ ID NO: 29)
APTSSSTKKTQLQLEHLLLILQMILNGINNYKNPKLTRMLTFKFYMPKKATELKHLQCLEEELKP
LEEVLNLAQSKNFHLRPRDLISIINVIVLELKGSETTFMCEYADETATIVEFLNRWITFSQSIIS
TLT
IL-2 D20T/Q126E variant sequence
(SEQ ID NO: 30)
APTSSSTKKTQLQLEHLLLTLQMILNGINNYKNPKLTRMLTFKFYMPKKATELKHLQCLEEELKP
LEEVLNLAQSKNFHLRPRDLISNINVIVLELKGSETTFMCEYADETATIVEFLNRWITFSESIIS
TLT
IL-2 D20T/N88R/Q126E variant sequence
(SEQ ID NO: 31)
APTSSSTKKTQLQLEHLLLTLQMILNGINNYKNPKLTRMLTFKFYMPKKATELKHLQCLEEELKP
LEEVLNLAQSKNFHLRPRDLISRINVIVLELKGSETTFMCEYADETATIVEFLNRWITFSESIIS
TLT
IL-2 D20T/Q126L variant sequence
(SEQ ID NO: 32)
APTSSSTKKTQLQLEHLLLTLQMILNGINNYKNPKLTRMLTFKFYMPKKATELKHLQCLEEELKP
LEEVLNLAQSKNFHLRPRDLISNINVIVLELKGSETTFMCEYADETATIVEFLNRWITFSLSIIS
TLT
IL-2 D20T/N88R/Q126L variant sequence
(SEQ ID NO: 33)
APTSSSTKKTQLQLEHLLLTLQMILNGINNYKNPKLTRMLTFKFYMPKKATELKHLQCLEEELKP
LEEVLNLAQSKNFHLRPRDLISRINVIVLELKGSETTFMCEYADETATIVEFLNRWITFSLSIIS
TLT
IL-2 L19N/Q126E variant sequence
(SEQ ID NO: 34)
APTSSSTKKTQLQLEHLLNDLQMILNGINNYKNPKLTRMLTFKFYMPKKATELKHLQCLEEELKP
LEEVLNLAQSKNFHLRPRDLISNINVIVLELKGSETTFMCEYADETATIVEFLNRWITFSESIIS
TLT
IL-2 L19R/Q126E variant sequence
(SEQ ID NO: 35)
APTSSSTKKTQLQLEHLLRDLQMILNGINNYKNPKLTRMLTFKFYMPKKATELKHLQCLEEELKP
LEEVLNLAQSKNFHLRPRDLISNINVIVLELKGSETTFMCEYADETATIVEFLNRWITFSESIIS
TLT
IL-2 L19Y/Q126E variant sequence
(SEQ ID NO: 36)
APTSSSTKKTQLQLEHLLYDLQMILNGINNYKNPKLTRMLTFKFYMPKKATELKHLQCLEEELKP
LEEVLNLAQSKNFHLRPRDLISNINVIVLELKGSETTFMCEYADETATIVEFLNRWITFSESIIS
TLT
IL-2 L19Q variant sequence
(SEQ ID NO: 37)
APTSSSTKKTQLQLEHLLQDLQMILNGINNYKNPKLTRMLTFKFYMPKKATELKHLQCLEEELKP
LEEVLNLAQSKNFHLRPRDLISNINVIVLELKGSETTFMCEYADETATIVEFLNRWITFSQSIIS
TLT
IL-2 L19H variant sequence
(SEQ ID NO: 38)
APTSSSTKKTQLQLEHLLHDLQMILNGINNYKNPKLTRMLTFKFYMPKKATELKHLQCLEEELKP
LEEVLNLAQSKNFHLRPRDLISNINVIVLELKGSETTFMCEYADETATIVEFLNRWITFSQSIIS
TLT
IL-2 L19D variant sequence
(SEQ ID NO: 39)
APTSSSTKKTQLQLEHLLDDLQMILNGINNYKNPKLTRMLTFKFYMPKKATELKHLQCLEEELKP
LEEVLNLAQSKNFHLRPRDLISNINVIVLELKGSETTFMCEYADETATIVEFLNRWITFSQSIIS
TLT
IL-2 L19P variant sequence
(SEQ ID NO: 40)
APTSSSTKKTQLQLEHLLPDLQMILNGINNYKNPKLTRMLTFKFYMPKKATELKHLQCLEEELKP
LEEVLNLAQSKNFHLRPRDLISNINVIVLELKGSETTFMCEYADETATIVEFLNRWITFSQSIIS
TLT
IL-2 D20T/S125I/Q126K variant sequence
(SEQ ID NO: 41)
APTSSSTKKTQLQLEHLLLTLQMILNGINNYKNPKLTRMLTFKFYMPKKATELKHLQCLEEELKP
LEEVLNLAQSKNFHLRPRDLISNINVIVLELKGSETTFMCEYADETATIVEFLNRWITFIKSIIS
TLT
IL-2 L19N/S125I/Q126K variant sequence
(SEQ ID NO: 42)
APTSSSTKKTQLQLEHLLNDLQM1LNGINNYKNPKLTRMLTFKFYMPKKATELKHLQCLEEELKP
LEEVLNLAQSKNFHLRPRDLISNINVIVLELKGSETTFMCEYADETATIVEFLNRWITFIKSIIS
TLT
IL-2 L19R/S125I/Q126K variant sequence
(SEQ ID NO: 43)
APTSSSTKKTQLQLEHLLRDLQM1LNGINNYKNPKLTRMLTFKFYMPKKATELKHLQCLEEELKP
LEEVLNLAQSKNFHLRPRDLISNINVIVLELKGSETTFMCEYADETATIVEFLNRWITFIKSIIS
TLT
Human IgG1-Fc
(SEQ ID NO: 44)
DKTHTCPPCPAPELLGGPSVFLFPPKPKDTLMISRTPEVTCVVVDVSHEDPEVKFNWYVDGVE
VHNAKTKPREEQYNSTYRVVSVLTVLHQDWLNGKEYKCKVSNKALPAPIEKTISKAKGQPREP
QVYTLPPSRDELTKNQVSLTCLVKGFYPSDIAVEWESNGQPENNYKTTPPVLDSDGSFFLYSK
LTVDKSRWQQGNVFSCSVMHEALHNHYTQKSLSLSPG
Human IgG1-Fc with reduced/abolished effector function
(SEQ ID NO: 45)
DKTHTCPPCPAPEAAGAPSVFLFPPKPKDTLMISRTPEVTCVVVDVSHEDPEVKFNWYVDGVE
VHNAKTKPREEQYNSTYRVVSVLTVLHQDWLNGKEYKCKVSNKALPAPIEKTISKAKGQPREP
QVYTLPPSRDELTKNQVSLTCLVKGFYPSDIAVEWESNGQPENNYKTTPPVLDSDGSFFLYSK
LTVDKSRWQQGNVFSCSVMHEALHNHYTQKSLSLSPG
Knob-Fc
(SEQ ID NO: 46)
DKTHTCPPCPAPEAAGAPSVFLFPPKPKDTLMISRTPEVTCVVVDVSHEDPEVKFNWYVDGVE
VHNAKTKPREEQYNSTYRVVSVLTVLHQDWLNGKEYKCKVSNKALPAPIEKTISKAKGQPREP
QVCTLPPSREEMTKNQVSLWCLVKGFYPSDIAVEWESNGQPENNYKTTPPVLDSDGSFFLYSK
LTVDKSRWQQGNVFSCSVMHEALHNHYTQKSLSLSPG
Hole-Fc
(SEQ ID NO: 47)
DKTHTCPPCPAPEAAGAPSVFLFPPKPKDTLMISRTPEVTCVVVDVSHEDPEVKFNWYVDGVE
VHNAKTKPREEQYNSTYRVVSVLTVLHQDWLNGKEYKCKVSNKALPAPIEKTISKAKGQPREP
QVYTLPPCREEMTKNQVSLSCAVKGFYPSDIAVEWESNGQPENNYKTTPPVLDSDGSFFLVSK
LTVDKSRWQQGNVFSCSVMHEALHNHYTQKSLSLSPG
Peptide linker sequence
(SEQ ID NO: 48)
GGGSGGGSGGGS
Peptide linker sequence
(SEQ ID NO: 49)
GGGS
Peptide linker sequence
(SEQ ID NO: 50)
GSSGGSGGSGGSG
Peptide linker sequence
(SEQ ID NO: 51)
GSSGT
Peptide linker sequence
(SEQ ID NO: 52)
GGGGSGGGGSGGGS
Peptide linker sequence
(SEQ ID NO: 53)
AEAAAKEAAAKEAAAKA
Peptide linker sequence
(SEQ ID NO: 54)
GGGGSGGGGSGGGGSGGGGS
Peptide linker sequence
(SEQ ID NO: 55)
GGGSGGGS
Peptide linker sequence
(SEQ ID NO: 56)
GS
Peptide linker sequence
(SEQ ID NO: 57)
GGS
Peptide linker sequence
(SEQ ID NO: 58)
GGGGS
Peptide linker sequence
(SEQ ID NO: 59)
GGSG
Peptide linker sequence
(SEQ ID NO: 60)
SGGG
Peptide linker sequence
(SEQ ID NO: 61)
GSGS
Peptide linker sequence
(SEQ ID NO: 62)
GSGSGS
Peptide linker sequence
(SEQ ID NO: 63)
GSGSGSGS
Peptide linker sequence
(SEQ ID NO: 64)
GSGSGSGSGS
Peptide linker sequence
(SEQ ID NO: 65)
GSGSGSGSGSGS
Peptide linker sequence
(SEQ ID NO: 66)
GGGGSGGGGS
Peptide linker sequence
(SEQ ID NO: 67)
GGGGSGGGGSGGGGS
Human IL-2Rα sushi domains sequence
(SEQ ID NO: 68)
ELCDDDPPEIPHATFKAMAYKEGTMLNCECKRGFRRIKSGSLYMLCTGNSSHSSWDNQCQCT
SSATRNTTKQVTPQPEEQKERKTTEMQSPMQPVDQASLPGHCREPPPWENEATERIYHFVVG
QMVYYQCVQGYRALHRGPAESVCKMTHGKTRWTQPQLICTG
P-0327
(SEQ ID NO: 69)
DKTHTCPPCPAPEAAGAPSVFLFPPKPKDTLMISRTPEVTCVVVDVSHEDPEVKFNWYVDGV
EVHNAKTKPREEQYNSTYRVVSVLTVLHQDWLNGKEYKCKVSNKALPAPIEKTISKAKGQPR
EPQVYTLPPSRDELTKNQVSLTCLVKGFYPSDIAVEWESNGQPENNYKTTPPVLDSDGSFFL
YSKLTVDKSRWQQGNVFSCSVMHEALHNHYTQKSLSLSPGGGGGSGGGGSGGGGSELCDDDP
PEIPHATFKAMAYKEGTMLNCECKRGFRRIKSGSLYMLCTGNSSHSSWDNQCQCTSSATRNT
TKQVTPQPEEQKERKTTEMQSPMQPVDQASLPGHCREPPPWENEATERIYHFVVGQMVYYQC
VQGYRALHRGPAESVCKMTHGKTRWTQPQLICTGGGGGSGGGGSGGGGSAPTSSSTKKTQLQ
LEHLLLDLQMILNGINNYKNPKLTRMLTFKFYMPKKATELKHLQCLEEELKPLEEVLNLAQS
KNFHLRPRDLISNINVIVLELKGSETTFMCEYADETATIVEFLNRWITFSQSIISTLT
P-0422
(SEQ ID NO: 70)
APTSSSTKKTQLQLEHLLLDLQMILNGINNYKNPKLTRMLTFKFYMPKKATELKHLQCLEEE
LKPLEEVLNLAQSKNFHLRPRDLISNINVIVLELKGSETTFMCEYADETATIVEFLNRWITF
SQSIISTLTGGGGSGGGGSGGGGSELCDDDPPEIPHATFKAMAYKEGTMLNCECKRGFRRIK
SGSLYMLCTGNSSHSSWDNQCQCTSSATRNTTKQVTPQPEEQKERKTTEMQSPMQPVDQASL
PGHCREPPPWENEATERIYHFVVGQMVYYQCVQGYRALHRGPAESVCKMTHGKTRWTQPQLI
CTGGGGSGGGGSGGGGSCPPCPAPEAAGAPSVFLFPPKPKDTLMISRTPEVTCVVVDVSHED
PEVKFNWYVDGVEVHNAKTKPREEQYNSTYRVVSVLTVLHQDWLNGKEYKCKVSNKALPAPI
EKTISKAKGQPREPQVYTLPPSRDELTKNQVSLTCLVKGFYPSDIAVEWESNGQPENNYKTT
PPVLDSDGSFFLYSKLTVDKSRWQQGNVFSCSVMHEALHNHYTQKSLSLSPGGGGGSGGGGS
P-0250
(SEQ ID NO: 71)
DKTHTCPPCPAPEAAGAPSVFLFPPKPKDTLMISRTPEVTCVVVDVSHEDPEVKFNWYVDGV
EVHNAKTKPREEQYNSTYRVVSVLTVLHQDWLNGKEYKCKVSNKALPAPIEKTISKAKGQPR
EPQVYTLPPSRDELTKNQVSLTCLVKGFYPSDIAVEWESNGQPENNYKTTPPVLDSDGSFFL
YSKLTVDKSRWQQGNVFSCSVMHEALHNHYTQKSLSLSPGGGGSGGGSAPTSSSIKKTQLQL
EHLLLDLQMILNGINNYKNPKLTRMLTFKFYMPKKATELKHLQCLEEELKPLEEVLNLAQSK
NFHLRPRDLISNINVIVLELKGSETTFMCEYADETATIVEFLNRWITFSQSIISTLT
P-0305
(SEQ ID NO: 72)
APTSSSTKKTQLQLEHLLLDLQMILNGINNYKNPKLTRMLTFKFYMPKKATELKHLQCLEEE
LKPLEEVLNLAQSKNFHLRPRDLISNINVIVLELKGSETTFMCEYADETATIVEFLNRWITF
SQSIISTLTAEAAAKEAAAKEAAAKACPPCPAPEAAGAPSVFLFPPKPKDTLMISRTPEVTC
VVVDVSHEDPEVKFNWYVDGVEVHNAKTKPREEQYNSTYRVVSVLTVLHQDWLNGKEYKCKV
SNKALPAPIEKTISKAKGQPREPQVYTLPPSRDELTKNQVSLTCLVKGFYPSDIAVEWESNG
QPENNYKTTPPVLDSDGSFFLYSKLTVDKSRWQQGNVFSCSVMHEALHNHYTQKSLSLSPG
P-0254
(SEQ ID NO: 73)
DKTHTCPPCPAPEAAGAPSVFLFPPKPKDTLMISRTPEVTCVVVDVSHEDPEVKFNWYVDGV
EVHNAKTKPREEQYNSTYRVVSVLTVLHQDWLNGKEYKCKVSNKALPAPIEKTISKAKGQPR
EPQVYTLPPSRDELTKNQVSLTCLVKGFYPSDIAVEWESNGQPENNYKTTPPVLDSDGSFFL
YSKLTVDKSRWQQGNVFSCSVMHEALHNHYTQKSLSLSPGGGGSGGGSAPTSSSIKKTQLQL
EHLLLDLQMILNGINNYKNPKLTRMLTFKFYMPKKATELKHLQCLEEELKPLEEVLNLAQSK
NFHLRPRDLISRINVIVLELKGSETTFMCEYADETATIVEFLNRWITFSQSIISTLT
P-0363
(SEQ ID NO: 74)
DKTHTCPPCPAPEAAGAPSVFLFPPKPKDTLMISRTPEVTCVVVDVSHEDPEVKFNWYVDGV
EVHNAKTKPREEQYNSTYRVVSVLTVLHQDWLNGKEYKCKVSNKALPAPIEKTISKAKGQPR
EPQVYTLPPSRDELTKNQVSLTCLVKGFYPSDIAVEWESNGQPENNYKTTPPVLDSDGSFFL
YSKLTVDKSRWQQGNVFSCSVMHEALHNHYTQKSLSLSPGGGGSGGGSAPTSSSIKKTQLQL
EHLLLTLQMILNGINNYKNPKLTRMLTFKFYMPKKATELKHLQCLEEELKPLEEVLNLAQSK
NFHLRPRDLISNINVIVLELKGSETTFMCEYADETATIVEFLNRWITFSQSIISTLT
P-0364
(SEQ ID NO: 75)
DKTHTCPPCPAPEAAGAPSVFLFPPKPKDTLMISRTPEVTCVVVDVSHEDPEVKFNWYVDGV
EVHNAKTKPREEQYNSTYRVVSVLTVLHQDWLNGKEYKCKVSNKALPAPIEKTISKAKGQPR
EPQVYTLPPSRDELTKNQVSLTCLVKGFYPSDIAVEWESNGQPENNYKTTPPVLDSDGSFFL
YSKLTVDKSRWQQGNVFSCSVMHEALHNHYTQKSLSLSPGGGGSGGGSAPTSSSIKKTQLQL
EHLLLELQMILNGINNYKNPKLTRMLTFKFYMPKKATELKHLQCLEEELKPLEEVLNLAQSK
NFHLRPRDLISNINVIVLELKGSETTFMCEYADETATIVEFLNRWITFSQSIISTLT
P-0365
(SEQ ID NO: 76)
DKTHTCPPCPAPEAAGAPSVFLFPPKPKDTLMISRTPEVTCVVVDVSHEDPEVKFNWYVDGV
EVHNAKTKPREEQYNSTYRVVSVLTVLHQDWLNGKEYKCKVSNKALPAPIEKTISKAKGQPR
EPQVYTLPPSRDELTKNQVSLTCLVKGFYPSDIAVEWESNGQPENNYKTTPPVLDSDGSFFL
YSKLTVDKSRWQQGNVFSCSVMHEALHNHYTQKSLSLSPGGGGSGGGSAPTSSSIKKTQLQL
EHLLLNLQMILNGINNYKNPKLTRMLTFKFYMPKKATELKHLQCLEEELKPLEEVLNLAQSK
NFHLRPRDLISNINVIVLELKGSETTFMCEYADETATIVEFLNRWITFSQSIISTLT
P-0366
(SEQ ID NO: 77)
DKTHTCPPCPAPEAAGAPSVFLFPPKPKDTLMISRTPEVTCVVVDVSHEDPEVKFNWYVDGV
EVHNAKTKPREEQYNSTYRVVSVLTVLHQDWLNGKEYKCKVSNKALPAPIEKTISKAKGQPR
EPQVYTLPPSRDELTKNQVSLTCLVKGFYPSDIAVEWESNGQPENNYKTTPPVLDSDGSFFL
YSKLTVDKSRWQQGNVFSCSVMHEALHNHYTQKSLSLSPGGGGSGGGSAPTSSSIKKTQLQL
EHLLLQLQMILNGINNYKNPKLTRMLTFKFYMPKKATELKHLQCLEEELKPLEEVLNLAQSK
NFHLRPRDLISNINVIVLELKGSETTFMCEYADETATIVEFLNRWITFSQSIISTLT
P-0367
(SEQ ID NO: 78)
DKTHTCPPCPAPEAAGAPSVFLFPPKPKDTLMISRTPEVTCVVVDVSHEDPEVKFNWYVDGV
EVHNAKTKPREEQYNSTYRVVSVLTVLHQDWLNGKEYKCKVSNKALPAPIEKTISKAKGQPR
EPQVYTLPPSRDELTKNQVSLTCLVKGFYPSDIAVEWESNGQPENNYKTTPPVLDSDGSFFL
YSKLTVDKSRWQQGNVFSCSVMHEALHNHYTQKSLSLSPGGGGSGGGSAPTSSSIKKTQLQL
EHLLLSLQMILNGINNYKNPKLTRMLTFKFYMPKKATELKHLQCLEEELKPLEEVLNLAQSK
NFHLRPRDLISNINVIVLELKGSETTFMCEYADETATIVEFLNRWITFSQSIISTLT
P-0368
(SEQ ID NO: 79)
DKTHTCPPCPAPEAAGAPSVFLFPPKPKDTLMISRTPEVTCVVVDVSHEDPEVKFNWYVDGV
EVHNAKTKPREEQYNSTYRVVSVLTVLHQDWLNGKEYKCKVSNKALPAPIEKTISKAKGQPR
EPQVYTLPPSRDELTKNQVSLTCLVKGFYPSDIAVEWESNGQPENNYKTTPPVLDSDGSFFL
YSKLTVDKSRWQQGNVFSCSVMHEALHNHYTQKSLSLSPGGGGSGGGSAPTSSSIKKTQLQL
EHLLLYLQMILNGINNYKNPKLTRMLTFKFYMPKKATELKHLQCLEEELKPLEEVLNLAQSK
NFHLRPRDLISNINVIVLELKGSETTFMCEYADETATIVEFLNRWITFSQSIISTLT
P-0252
(SEQ ID NO: 80)
DKTHTCPPCPAPEAAGAPSVFLFPPKPKDTLMISRTPEVTCVVVDVSHEDPEVKFNWYVDGV
EVHNAKTKPREEQYNSTYRVVSVLTVLHQDWLNGKEYKCKVSNKALPAPIEKTISKAKGQPR
EPQVYTLPPSRDELTKNQVSLTCLVKGFYPSDIAVEWESNGQPENNYKTTPPVLDSDGSFFL
YSKLTVDKSRWQQGNVFSCSVMHEALHNHYTQKSLSLSPGGGGSGGGSAPTSSSIKKTQLQL
EHLLLILQMILNGINNYKNPKLTRMLTFKFYMPKKATELKHLQCLEEELKPLEEVLNLAQSK
NFHLRPRDLISNINVIVLELKGSETTFMCEYADETATIVEFLNRWITFSQSIISTLT
P-0372
(SEQ ID NO: 81)
DKTHTCPPCPAPEAAGAPSVFLFPPKPKDTLMISRTPEVTCVVVDVSHEDPEVKFNWYVDGV
EVHNAKTKPREEQYNSTYRVVSVLTVLHQDWLNGKEYKCKVSNKALPAPIEKTISKAKGQPR
EPQVYTLPPSRDELTKNQVSLTCLVKGFYPSDIAVEWESNGQPENNYKTTPPVLDSDGSFFL
YSKLTVDKSRWQQGNVFSCSVMHEALHNHYTQKSLSLSPGGGGSGGGSAPTSSSIKKTQLQL
EHLLYDLQMILNGINNYKNPKLTRMLTFKFYMPKKATELKHLQCLEEELKPLEEVLNLAQSK
NFHLRPRDLISNINVIVLELKGSETTFMCEYADETATIVEFLNRWITFSQSIISTLT
P-0373
(SEQ ID NO: 82)
DKTHTCPPCPAPEAAGAPSVFLFPPKPKDTLMISRTPEVTCVVVDVSHEDPEVKFNWYVDGV
EVHNAKTKPREEQYNSTYRVVSVLTVLHQDWLNGKEYKCKVSNKALPAPIEKTISKAKGQPR
EPQVYTLPPSRDELTKNQVSLTCLVKGFYPSDIAVEWESNGQPENNYKTTPPVLDSDGSFFL
YSKLTVDKSRWQQGNVFSCSVMHEALHNHYTQKSLSLSPGGGGSGGGSAPTSSSIKKTQLQL
EHLLNDLQMILNGINNYKNPKLTRMLTFKFYMPKKATELKHLQCLEEELKPLEEVLNLAQSK
NFHLRPRDLISNINVIVLELKGSETTFMCEYADETATIVEFLNRWITFSQSIISTLT
P-0374
(SEQ ID NO: 83)
DKTHTCPPCPAPEAAGAPSVFLFPPKPKDTLMISRTPEVTCVVVDVSHEDPEVKFNWYVDGV
EVHNAKTKPREEQYNSTYRVVSVLTVLHQDWLNGKEYKCKVSNKALPAPIEKTISKAKGQPR
EPQVYTLPPSRDELTKNQVSLTCLVKGFYPSDIAVEWESNGQPENNYKTTPPVLDSDGSFFL
YSKLTVDKSRWQQGNVFSCSVMHEALHNHYTQKSLSLSPGGGGSGGGSAPTSSSIKKTQLQL
EHLLRDLQMILNGINNYKNPKLTRMLTFKFYMPKKATELKHLQCLEEELKPLEEVLNLAQSK
NFHLRPRDLISNINVIVLELKGSETTFMCEYADETATIVEFLNRWITFSQSIISTLT
P-0253
(SEQ ID NO: 84)
DKTHTCPPCPAPEAAGAPSVFLFPPKPKDTLMISRTPEVTCVVVDVSHEDPEVKFNWYVDGV
EVHNAKTKPREEQYNSTYRVVSVLTVLHQDWLNGKEYKCKVSNKALPAPIEKTISKAKGQPR
EPQVYTLPPSRDELTKNQVSLTCLVKGFYPSDIAVEWESNGQPENNYKTTPPVLDSDGSFFL
YSKLTVDKSRWQQGNVFSCSVMHEALHNHYTQKSLSLSPGGGGSGGGSAPTSSSIKKTQLQL
EHLLLDLQMILNGINNYKNPKLTRMLTFKFYMPKKATELKHLQCLEEELKPLEEVLNLAQSK
NFHLRPRDLISGINVIVLELKGSETTFMCEYADETATIVEFLNRWITFSQSIISTLT
P-0302
(SEQ ID NO: 85)
DKTHTCPPCPAPEAAGAPSVFLFPPKPKDTLMISRTPEVTCVVVDVSHEDPEVKFNWYVDGV
EVHNAKTKPREEQYNSTYRVVSVLTVLHQDWLNGKEYKCKVSNKALPAPIEKTISKAKGQPR
EPQVYTLPPSRDELTKNQVSLTCLVKGFYPSDIAVEWESNGQPENNYKTTPPVLDSDGSFFL
YSKLTVDKSRWQQGNVFSCSVMHEALHNHYTQKSLSLSPGGGGSGGGSAPTSSSIKKTQLQL
EHLLLDLQMILNGINNYKNPKLTRMLTFKFYMPKKATELKHLQCLEEELKPLEEVLNLAQSK
NFHLRPRDLISIINVIVLELKGSETTFMCEYADETATIVEFLNRWITFSQSIISTLT
P-0375
(SEQ ID NO: 86)
DKTHTCPPCPAPEAAGAPSVFLFPPKPKDTLMISRTPEVTCVVVDVSHEDPEVKFNWYVDGV
EVHNAKTKPREEQYNSTYRVVSVLTVLHQDWLNGKEYKCKVSNKALPAPIEKTISKAKGQPR
EPQVYTLPPSRDELTKNQVSLTCLVKGFYPSDIAVEWESNGQPENNYKTTPPVLDSDGSFFL
YSKLTVDKSRWQQGNVFSCSVMHEALHNHYTQKSLSLSPGGGGSGGGSAPTSSSIKKTQLQL
EHLLLDLQMILNGINNYKNPKLTRMLTFKFYMPKKATELKHLQCLEEELKPLEEVLNLAQSK
NFHLRPRDLISQINVIVLELKGSETTFMCEYADETATIVEFLNRWITFSQSIISTLT
P-0376
(SEQ ID NO: 87)
DKTHTCPPCPAPEAAGAPSVFLFPPKPKDTLMISRTPEVTCVVVDVSHEDPEVKFNWYVDGV
EVHNAKTKPREEQYNSTYRVVSVLTVLHQDWLNGKEYKCKVSNKALPAPIEKTISKAKGQPR
EPQVYTLPPSRDELTKNQVSLTCLVKGFYPSDIAVEWESNGQPENNYKTTPPVLDSDGSFFL
YSKLTVDKSRWQQGNVFSCSVMHEALHNHYTQKSLSLSPGGGGSGGGSAPTSSSIKKTQLQL
EHLLLDLQMILNGINNYKNPKLTRMLTFKFYMPKKATELKHLQCLEEELKPLEEVLNLAQSK
NFHLRPRDLISEINVIVLELKGSETTFMCEYADETATIVEFLNRWITFSQSIISTLT
P-0377
(SEQ ID NO: 88)
DKTHTCPPCPAPEAAGAPSVFLFPPKPKDTLMISRTPEVTCVVVDVSHEDPEVKFNWYVDGV
EVHNAKTKPREEQYNSTYRVVSVLTVLHQDWLNGKEYKCKVSNKALPAPIEKTISKAKGQPR
EPQVYTLPPSRDELTKNQVSLTCLVKGFYPSDIAVEWESNGQPENNYKTTPPVLDSDGSFFL
YSKLTVDKSRWQQGNVFSCSVMHEALHNHYTQKSLSLSPGGGGSGGGSAPTSSSIKKTQLQL
EHLLLDLQMILNGINNYKNPKLTRMLTFKFYMPKKATELKHLQCLEEELKPLEEVLNLAQSK
NFHLRPRDLISTINVIVLELKGSETTFMCEYADETATIVEFLNRWITFSQSIISTLT
P-0378
(SEQ ID NO: 89)
DKTHTCPPCPAPEAAGAPSVFLFPPKPKDTLMISRTPEVTCVVVDVSHEDPEVKFNWYVDGV
EVHNAKTKPREEQYNSTYRVVSVLTVLHQDWLNGKEYKCKVSNKALPAPIEKTISKAKGQPR
EPQVYTLPPSRDELTKNQVSLTCLVKGFYPSDIAVEWESNGQPENNYKTTPPVLDSDGSFFL
YSKLTVDKSRWQQGNVFSCSVMHEALHNHYTQKSLSLSPGGGGSGGGSAPTSSSIKKTQLQL
EHLLLDLQMILNGINNYKNPKLTRMLTFKFYMPKKATELKHLQCLEEELKPLEEVLNLAQSK
NFHLRPRDLISMINVIVLELKGSETTFMCEYADETATIVEFLNRWITFSQSIISTLT
P-0303
(SEQ ID NO: 90)
DKTHTCPPCPAPEAAGAPSVFLFPPKPKDTLMISRTPEVTCVVVDVSHEDPEVKFNWYVDGV
EVHNAKTKPREEQYNSTYRVVSVLTVLHQDWLNGKEYKCKVSNKALPAPIEKTISKAKGQPR
EPQVYTLPPSRDELTKNQVSLTCLVKGFYPSDIAVEWESNGQPENNYKTTPPVLDSDGSFFL
YSKLTVDKSRWQQGNVFSCSVMHEALHNHYTQKSLSLSPGGGGSGGGSAPTSSSIKKTQLQL
EHLLLDLQMILNGINNYKNPKLTRMLTFKFYMPKKATELKHLQCLEEELKPLEEVLNLAQSK
NFHLRPRDLISNINVIVLELKGSETTFMCEYADETATIVEFLNRWITFSESIISTLT
P-0304
(SEQ ID NO: 91)
DKTHTCPPCPAPEAAGAPSVFLFPPKPKDTLMISRTPEVTCVVVDVSHEDPEVKFNWYVDGV
EVHNAKTKPREEQYNSTYRVVSVLTVLHQDWLNGKEYKCKVSNKALPAPIEKTISKAKGQPR
EPQVYTLPPSRDELTKNQVSLTCLVKGFYPSDIAVEWESNGQPENNYKTTPPVLDSDGSFFL
YSKLTVDKSRWQQGNVFSCSVMHEALHNHYTQKSLSLSPGGGGSGGGSAPTSSSIKKTQLQL
EHLLLDLQMILNGINNYKNPKLTRMLTFKFYMPKKATELKHLQCLEEELKPLEEVLNLAQSK
NFHLRPRDLISNINVIVLELKGSETTFMCEYADETATIVEFLNRWITFSLSIISTLT
P-0369
(SEQ ID NO: 92)
DKTHTCPPCPAPEAAGAPSVFLFPPKPKDTLMISRTPEVTCVVVDVSHEDPEVKFNWYVDGV
EVHNAKTKPREEQYNSTYRVVSVLTVLHQDWLNGKEYKCKVSNKALPAPIEKTISKAKGQPR
EPQVYTLPPSRDELTKNQVSLTCLVKGFYPSDIAVEWESNGQPENNYKTTPPVLDSDGSFFL
YSKLTVDKSRWQQGNVFSCSVMHEALHNHYTQKSLSLSPGGGGSGGGSAPTSSSIKKTQLQL
EHLLLDLQMILNGINNYKNPKLTRMLTFKFYMPKKATELKHLQCLEEELKPLEEVLNLAQSK
NFHLRPRDLISNINVIVLELKGSETTFMCEYADETATIVEFLNRWITFSNSIISTLT
P-0370
(SEQ ID NO: 93)
DKTHTCPPCPAPEAAGAPSVFLFPPKPKDTLMISRTPEVTCVVVDVSHEDPEVKFNWYVDGV
EVHNAKTKPREEQYNSTYRVVSVLTVLHQDWLNGKEYKCKVSNKALPAPIEKTISKAKGQPR
EPQVYTLPPSRDELTKNQVSLTCLVKGFYPSDIAVEWESNGQPENNYKTTPPVLDSDGSFFL
YSKLTVDKSRWQQGNVFSCSVMHEALHNHYTQKSLSLSPGGGGSGGGSAPTSSSIKKTQLQL
EHLLLDLQMILNGINNYKNPKLTRMLTFKFYMPKKATELKHLQCLEEELKPLEEVLNLAQSK
NFHLRPRDLISNINVIVLELKGSETTFMCEYADETATIVEFLNRWITFSDSIISTLT
P-0371
(SEQ ID NO: 94)
DKTHTCPPCPAPEAAGAPSVFLFPPKPKDTLMISRTPEVTCVVVDVSHEDPEVKFNWYVDGV
EVHNAKTKPREEQYNSTYRVVSVLTVLHQDWLNGKEYKCKVSNKALPAPIEKTISKAKGQPR
EPQVYTLPPSRDELTKNQVSLTCLVKGFYPSDIAVEWESNGQPENNYKTTPPVLDSDGSFFL
YSKLTVDKSRWQQGNVFSCSVMHEALHNHYTQKSLSLSPGGGGSGGGSAPTSSSIKKTQLQL
EHLLLDLQMILNGINNYKNPKLTRMLTFKFYMPKKATELKHLQCLEEELKPLEEVLNLAQSK
NFHLRPRDLISNINVIVLELKGSETTFMCEYADETATIVEFLNRWITFSMSIISTLT
P-0251
(SEQ ID NO: 95)
DKTHTCPPCPAPEAAGAPSVFLFPPKPKDTLMISRTPEVTCVVVDVSHEDPEVKFNWYVDGV
EVHNAKTKPREEQYNSTYRVVSVLTVLHQDWLNGKEYKCKVSNKALPAPIEKTISKAKGQPR
EPQVYTLPPSRDELTKNQVSLTCLVKGFYPSDIAVEWESNGQPENNYKTTPPVLDSDGSFFL
YSKLTVDKSRWQQGNVFSCSVMHEALHNHYTQKSLSLSPGGGGSGGGSAPTSSSIKKTQLQL
EHLLLILQMILNGINNYKNPKLTRMLTFKFYMPKKATELKHLQCLEEELKPLEEVLNLAQSK
NFHLRPRDLISGINVIVLELKGSETTFMCEYADETATIVEFLNRWITFSQSIISTLT
P-0317
(SEQ ID NO: 96)
DKTHTCPPCPAPEAAGAPSVFLFPPKPKDTLMISRTPEVTCVVVDVSHEDPEVKFNWYVDGV
EVHNAKTKPREEQYNSTYRVVSVLTVLHQDWLNGKEYKCKVSNKALPAPIEKTISKAKGQPR
EPQVYTLPPSRDELTKNQVSLTCLVKGFYPSDIAVEWESNGQPENNYKTTPPVLDSDGSFFL
YSKLTVDKSRWQQGNVFSCSVMHEALHNHYTQKSLSLSPGGGGSGGGSAPTSSSIKKTQLQL
EHLLLILQMILNGINNYKNPKLTRMLTFKFYMPKKATELKHLQCLEEELKPLEEVLNLAQSK
NFHLRPRDLISRINVIVLELKGSETTFMCEYADETATIVEFLNRWITFSQSIISTLT
P-0318
(SEQ ID NO: 97)
DKTHTCPPCPAPEAAGAPSVFLFPPKPKDTLMISRTPEVTCVVVDVSHEDPEVKFNWYVDGV
EVHNAKTKPREEQYNSTYRVVSVLTVLHQDWLNGKEYKCKVSNKALPAPIEKTISKAKGQPR
EPQVYTLPPSRDELTKNQVSLTCLVKGFYPSDIAVEWESNGQPENNYKTTPPVLDSDGSFFL
YSKLTVDKSRWQQGNVFSCSVMHEALHNHYTQKSLSLSPGGGGSGGGSAPTSSSIKKTQLQL
EHLLLILQMILNGINNYKNPKLTRMLTFKFYMPKKATELKHLQCLEEELKPLEEVLNLAQSK
NFHLRPRDLISIINVIVLELKGSETTFMCEYADETATIVEFLNRWITFSQSIISTLT
P-0324
(SEQ ID NO: 98)
DKTHTCPPCPAPEAAGAPSVFLFPPKPKDTLMISRTPEVTCVVVDVSHEDPEVKFNWYVDGV
EVHNAKTKPREEQYNSTYRVVSVLTVLHQDWLNGKEYKCKVSNKALPAPIEKTISKAKGQPR
EPQVYTLPPSRDELTKNQVSLTCLVKGFYPSDIAVEWESNGQPENNYKTTPPVLDSDGSFFL
YSKLTVDKSRWQQGNVFSCSVMHEALHNHYTQKSLSLSPGGGGSGGGSAPTSSSIKKTQLQL
EHLLLTLQMILNGINNYKNPKLTRMLTFKFYMPKKATELKHLQCLEEELKPLEEVLNLAQSK
NFHLRPRDLISRINVIVLELKGSETTFMCEYADETATIVEFLNRWITFSQSIISTLT
P-0322
(SEQ ID NO: 99)
DKTHTCPPCPAPEAAGAPSVFLFPPKPKDTLMISRTPEVTCVVVDVSHEDPEVKFNWYVDGV
EVHNAKTKPREEQYNSTYRVVSVLTVLHQDWLNGKEYKCKVSNKALPAPIEKTISKAKGQPR
EPQVYTLPPSRDELTKNQVSLTCLVKGFYPSDIAVEWESNGQPENNYKTTPPVLDSDGSFFL
YSKLTVDKSRWQQGNVFSCSVMHEALHNHYTQKSLSLSPGGGGSGGGSAPTSSSIKKTQLQL
EHLLLTLQMILNGINNYKNPKLTRMLTFKFYMPKKATELKHLQCLEEELKPLEEVLNLAQSK
NFHLRPRDLISNINVIVLELKGSETTFMCEYADETATIVEFLNRWITFSESIISTLT
P-0323
(SEQ ID NO: 100)
DKTHTCPPCPAPEAAGAPSVFLFPPKPKDTLMISRTPEVTCVVVDVSHEDPEVKFNWYVDGV
EVHNAKTKPREEQYNSTYRVVSVLTVLHQDWLNGKEYKCKVSNKALPAPIEKTISKAKGQPR
EPQVYTLPPSRDELTKNQVSLTCLVKGFYPSDIAVEWESNGQPENNYKTTPPVLDSDGSFFL
YSKLTVDKSRWQQGNVFSCSVMHEALHNHYTQKSLSLSPGGGGSGGGSAPTSSSIKKTQLQL
EHLLLTLQMILNGINNYKNPKLTRMLTFKFYMPKKATELKHLQCLEEELKPLEEVLNLAQSK
NFHLRPRDLISNINVIVLELKGSETTFMCEYADETATIVEFLNRWITFSLSIISTLT
P-0325
(SEQ ID NO: 101)
DKTHTCPPCPAPEAAGAPSVFLFPPKPKDTLMISRTPEVTCVVVDVSHEDPEVKFNWYVDGV
EVHNAKTKPREEQYNSTYRVVSVLTVLHQDWLNGKEYKCKVSNKALPAPIEKTISKAKGQPR
EPQVYTLPPSRDELTKNQVSLTCLVKGFYPSDIAVEWESNGQPENNYKTTPPVLDSDGSFFL
YSKLTVDKSRWQQGNVFSCSVMHEALHNHYTQKSLSLSPGGGGSGGGSAPTSSSIKKTQLQL
EHLLLTLQMILNGINNYKNPKLTRMLTFKFYMPKKATELKHLQCLEEELKPLEEVLNLAQSK
NFHLRPRDLISRINVIVLELKGSETTFMCEYADETATIVEFLNRWITFSESIISTLT
P-0326
(SEQ ID NO: 102)
DKTHTCPPCPAPEAAGAPSVFLFPPKPKDTLMISRTPEVTCVVVDVSHEDPEVKFNWYVDGV
EVHNAKTKPREEQYNSTYRVVSVLTVLHQDWLNGKEYKCKVSNKALPAPIEKTISKAKGQPR
EPQVYTLPPSRDELTKNQVSLTCLVKGFYPSDIAVEWESNGQPENNYKTTPPVLDSDGSFFL
YSKLTVDKSRWQQGNVFSCSVMHEALHNHYTQKSLSLSPGGGGSGGGSAPTSSSIKKTQLQL
EHLLLTLQMILNGINNYKNPKLTRMLTFKFYMPKKATELKHLQCLEEELKPLEEVLNLAQSK
NFHLRPRDLISRINVIVLELKGSETTFMCEYADETATIVEFLNRWITFSLSIISTLT
P-0417
(SEQ ID NO: 103)
DKTHTCPPCPAPEAAGAPSVFLFPPKPKDTLMISRTPEVTCVVVDVSHEDPEVKFNWYVDGV
EVHNAKTKPREEQYNSTYRVVSVLTVLHQDWLNGKEYKCKVSNKALPAPIEKTISKAKGQPR
EPQVYTLPPSRDELTKNQVSLTCLVKGFYPSDIAVEWESNGQPENNYKTTPPVLDSDGSFFL
YSKLTVDKSRWQQGNVFSCSVMHEALHNHYTQKSLSLSPGGGGSGGGSAPTSSSIKKTQLQL
EHLLNDLQMILNGINNYKNPKLTRMLTFKFYMPKKATELKHLQCLEEELKPLEEVLNLAQSK
NFHLRPRDLISNINVIVLELKGSETTFMCEYADETATIVEFLNRWITFSESIISTLT
P-0418
(SEQ ID NO: 104)
DKTHTCPPCPAPEAAGAPSVFLFPPKPKDTLMISRTPEVTCVVVDVSHEDPEVKFNWYVDGV
EVHNAKTKPREEQYNSTYRVVSVLTVLHQDWLNGKEYKCKVSNKALPAPIEKTISKAKGQPR
EPQVYTLPPSRDELTKNQVSLTCLVKGFYPSDIAVEWESNGQPENNYKTTPPVLDSDGSFFL
YSKLTVDKSRWQQGNVFSCSVMHEALHNHYTQKSLSLSPGGGGSGGGSAPTSSSIKKTQLQL
EHLLRDLQMILNGINNYKNPKLTRMLTFKFYMPKKATELKHLQCLEEELKPLEEVLNLAQSK
NFHLRPRDLISNINVIVLELKGSETTFMCEYADETATIVEFLNRWITFSESIISTLT
P-0419
(SEQ ID NO: 105)
DKTHTCPPCPAPEAAGAPSVFLFPPKPKDTLMISRTPEVTCVVVDVSHEDPEVKFNWYVDGV
EVHNAKTKPREEQYNSTYRVVSVLTVLHQDWLNGKEYKCKVSNKALPAPIEKTISKAKGQPR
EPQVYTLPPSRDELTKNQVSLTCLVKGFYPSDIAVEWESNGQPENNYKTTPPVLDSDGSFFL
YSKLTVDKSRWQQGNVFSCSVMHEALHNHYTQKSLSLSPGGGGSGGGSAPTSSSIKKTQLQL
EHLLYDLQMILNGINNYKNPKLTRMLTFKFYMPKKATELKHLQCLEEELKPLEEVLNLAQSK
NFHLRPRDLISNINVIVLELKGSETTFMCEYADETATIVEFLNRWITFSESIISTLT
P-0416
(SEQ ID NO: 106)
APTSSSTKKTQLQLEHLLNDLQMILNGINNYKNPKLTRMLTFKFYMPKKATELKHLQCLEEE
LKPLEEVLNLAQSKNFHLRPRDLISNINVIVLELKGSETTFMCEYADETATIVEFLNRWITF
SQSIISTLTAEAAAKEAAAKEAAAKACPPCPAPEAAGAPSVFLFPPKPKDTLMISRTPEVTC
VVVDVSHEDPEVKFNWYVDGVEVHNAKTKPREEQYNSTYRVVSVLTVLHQDWLNGKEYKCKV
SNKALPAPIEKTISKAKGQPREPQVYTLPPSRDELTKNQVSLTCLVKGFYPSDIAVEWESNG
QPENNYKTTPPVLDSDGSFFLYSKLTVDKSRWQQGNVFSCSVMHEALHNHYTQKSLSLSPG
P-0412
(SEQ ID NO: 107)
APTSSSTKKTQLQLEHLLLELQMILNGINNYKNPKLTRMLTFKFYMPKKATELKHLQCLEEE
LKPLEEVLNLAQSKNFHLRPRDLISNINVIVLELKGSETTFMCEYADETATIVEFLNRWITF
SQSIISTLTAEAAAKEAAAKEAAAKACPPCPAPEAAGAPSVFLFPPKPKDTLMISRTPEVTC
VVVDVSHEDPEVKFNWYVDGVEVHNAKTKPREEQYNSTYRVVSVLTVLHQDWLNGKEYKCKV
SNKALPAPIEKTISKAKGQPREPQVYTLPPSRDELTKNQVSLTCLVKGFYPSDIAVEWESNG
QPENNYKTTPPVLDSDGSFFLYSKLTVDKSRWQQGNVFSCSVMHEALHNHYTQKSLSLSPG
P-0306
(SEQ ID NO: 108)
APTSSSTKKTQLQLEHLLLILQMILNGINNYKNPKLTRMLTFKFYMPKKATELKHLQCLEEE
LKPLEEVLNLAQSKNFHLRPRDLISNINVIVLELKGSETTFMCEYADETATIVEFLNRWITF
SQSIISTLTAEAAAKEAAAKEAAAKACPPCPAPEAAGAPSVFLFPPKPKDTLMISRTPEVTC
VVVDVSHEDPEVKFNWYVDGVEVHNAKTKPREEQYNSTYRVVSVLTVLHQDWLNGKEYKCKV
SNKALPAPIEKTISKAKGQPREPQVYTLPPSRDELTKNQVSLTCLVKGFYPSDIAVEWESNG
QPENNYKTTPPVLDSDGSFFLYSKLTVDKSRWQQGNVFSCSVMHEALHNHYTQKSLSLSPG
P-0319
(SEQ ID NO: 109)
APTSSSTKKTQLQLEHLLLILQMILNGINNYKNPKLTRMLTFKFYMPKKATELKHLQCLEEE
LKPLEEVLNLAQSKNFHLRPRDLISRINVIVLELKGSETTFMCEYADETATIVEFLNRWITF
SQSIISTLTAEAAAKEAAAKEAAAKACPPCPAPEAAGAPSVFLFPPKPKDTLMISRTPEVTC
VVVDVSHEDPEVKFNWYVDGVEVHNAKTKPREEQYNSTYRVVSVLTVLHQDWLNGKEYKCKV
SNKALPAPIEKTISKAKGQPREPQVYTLPPSRDELTKNQVSLTCLVKGFYPSDIAVEWESNG
QPENNYKTTPPVLDSDGSFFLYSKLTVDKSRWQQGNVFSCSVMHEALHNHYTQKSLSLSPG
P-0582
(SEQ ID NO: 110)
DKTHTCPPCPAPEAAGAPSVFLFPPKPKDTLMISRTPEVTCVVVDVSHEDPEVKFNWYVDGV
EVHNAKTKPREEQYNSTYRVVSVLTVLHQDWLNGKEYKCKVSNKALPAPIEKTISKAKGQPR
EPQVYTLPPSRDELTKNQVSLTCLVKGFYPSDIAVEWESNGQPENNYKTTPPVLDSDGSFFL
YSKLTVDKSRWQQGNVFSCSVMHEALHNHYTQKSLSLSPGGGGSGGGSAPTSSSTKKTQLQL
EHLLLTLQMILNGINNYKNPKLTRMLTFKFYMPKKATELKHLQCLEEELKPLEEVLNLAQSK
NFHLRPRDLISNINVIVLELKGSETTFMCEYADETATIVEFLNRWITFIKSIISTLT
P-0583
(SEQ ID NO: 111)
DKTHTCPPCPAPEAAGAPSVFLFPPKPKDTLMISRTPEVTCVVVDVSHEDPEVKFNWYVDGV
EVHNAKTKPREEQYNSTYRVVSVLTVLHQDWLNGKEYKCKVSNKALPAPIEKTISKAKGQPR
EPQVYTLPPSRDELTKNQVSLTCLVKGFYPSDIAVEWESNGQPENNYKTTPPVLDSDGSFFL
YSKLTVDKSRWQQGNVFSCSVMHEALHNHYTQKSLSLSPGGGGSGGGSAPTSSSTKKTQLQL
EHLLNDLQMILNGINNYKNPKLTRMLTFKFYMPKKATELKHLQCLEEELKPLEEVLNLAQSK
NFHLRPRDLISNINVIVLELKGSETTFMCEYADETATIVEFLNRWITFIKSIISTLT
P-0584
(SEQ ID NO: 112)
DKTHTCPPCPAPEAAGAPSVFLFPPKPKDTLMISRTPEVTCVVVDVSHEDPEVKFNWYVDGV
EVHNAKTKPREEQYNSTYRVVSVLTVLHQDWLNGKEYKCKVSNKALPAPIEKTISKAKGQPR
EPQVYTLPPSRDELTKNQVSLTCLVKGFYPSDIAVEWESNGQPENNYKTTPPVLDSDGSFFL
YSKLTVDKSRWQQGNVFSCSVMHEALHNHYTQKSLSLSPGGGGSGGGSAPTSSSTKKTQLQL
EHLLRDLQMILNGINNYKNPKLTRMLTFKFYMPKKATELKHLQCLEEELKPLEEVLNLAQSK
NFHLRPRDLISNINVIVLELKGSETTFMCEYADETATIVEFLNRWITFIKSIISTLT
IL-2 L19S variant sequence
(SEQ ID NO: 113)
APTSSSTKKTQLQLEHLLSDLQMILNGINNYKNPKLTRMLTFKFYMPKKATELKHLQCLEEE
LKPLEEVLNLAQSKNFHLRPRDLISNINVIVLELKGSETTFMCEYADETATIVEFLNRWITF
SQSIISTLT
IL-2 L21S variant sequence
(SEQ ID NO: 114)
APTSSSTKKTQLQLEHLLLDSQMILNGINNYKNPKLTRMLTFKFYMPKKATELKHLQCLEEE
LKPLEEVLNLAQSKNFHLRPRDLISNINVIVLELKGSETTFMCEYADETATIVEFLNRWITF
SQSIISTLT
IL-2 L21N variant sequence
(SEQ ID NO: 115)
APTSSSTKKTQLQLEHLLLDNQMILNGINNYKNPKLTRMLTFKFYMPKKATELKHLQCLEEE
LKPLEEVLNLAQSKNFHLRPRDLISNINVIVLELKGSETTFMCEYADETATIVEFLNRWITF
SQSIISTLT
IL-2 L21R variant sequence
(SEQ ID NO: 116)
APTSSSTKKTQLQLEHLLLDRQMILNGINNYKNPKLTRMLTFKFYMPKKATELKHLQCLEEE
LKPLEEVLNLAQSKNFHLRPRDLISNINVIVLELKGSETTFMCEYADETATIVEFLNRWITF
SQSIISTLT
IL-2 Q126K variant sequence
(SEQ ID NO: 117)
APTSSSTKKTQLQLEHLLLDLQMILNGINNYKNPKLTRMLTFKFYMPKKATELKHLQCLEEE
LKPLEEVLNLAQSKNFHLRPRDLISNINVIVLELKGSETTFMCEYADETATIVEFLNRWITF
SKSIISTLT
IL-2 Q126H variant sequence
(SEQ ID NO: 118)
APTSSSTKKTQLQLEHLLLDLQMILNGINNYKNPKLTRMLTFKFYMPKKATELKHLQCLEEE
LKPLEEVLNLAQSKNFHLRPRDLISNINVIVLELKGSETTFMCEYADETATIVEFLNRWITF
SHSIISTLT
IL-2 Q126Y variant sequence
(SEQ ID NO: 119)
APTSSSTKKTQLQLEHLLLDLQMILNGINNYKNPKLTRMLTFKFYMPKKATELKHLQCLEEE
LKPLEEVLNLAQSKNFHLRPRDLISNINVIVLELKGSETTFMCEYADETATIVEFLNRWITF
SYSIISTLT
IL-2 S125E variant sequence
(SEQ ID NO: 120)
APTSSSTKKTQLQLEHLLLDLQMILNGINNYKNPKLTRMLTFKFYMPKKATELKHLQCLEEE
LKPLEEVLNLAQSKNFHLRPRDLISNINVIVLELKGSETTFMCEYADETATIVEFLNRWITF
EQSIISTLT
IL-2 S125K variant sequence
(SEQ ID NO: 121)
APTSSSTKKTQLQLEHLLLDLQMILNGINNYKNPKLTRMLTFKFYMPKKATELKHLQCLEEE
LKPLEEVLNLAQSKNFHLRPRDLISNINVIVLELKGSETTFMCEYADETATIVEFLNRWITF
KQSIISTLT
IL-2 S125H variant sequence
(SEQ ID NO: 122)
APTSSSTKKTQLQLEHLLLDLQMILNGINNYKNPKLTRMLTFKFYMPKKATELKHLQCLEEE
LKPLEEVLNLAQSKNFHLRPRDLISNINVIVLELKGSETTFMCEYADETATIVEFLNRWITF
HQSIISTLT
IL-2 S125W variant sequence
(SEQ ID NO: 123)
APTSSSTKKTQLQLEHLLLDLQMILNGINNYKNPKLTRMLTFKFYMPKKATELKHLQCLEEE
LKPLEEVLNLAQSKNFHLRPRDLISNINVIVLELKGSETTFMCEYADETATIVEFLNRWITF
WQSIISTLT
IL-2 S125I variant sequence
(SEQ ID NO: 124)
APTSSSTKKTQLQLEHLLLDLQMILNGINNYKNPKLTRMLTFKFYMPKKATELKHLQCLEEE
LKPLEEVLNLAQSKNFHLRPRDLISNINVIVLELKGSETTFMCEYADETATIVEFLNRWITF
IQSIISTLT
IL-2 Q22N variant sequence
(SEQ ID NO: 125)
APTSSSTKKTQLQLEHLLLDLNMILNGINNYKNPKLTRMLTFKFYMPKKATELKHLQCLEEE
LKPLEEVLNLAQSKNFHLRPRDLISNINVIVLELKGSETTFMCEYADETATIVEFLNRWITF
SQSIISTLT
IL-2 Q22H variant sequence
(SEQ ID NO: 126)
APTSSSTKKTQLQLEHLLLDLHMILNGINNYKNPKLTRMLTFKFYMPKKATELKHLQCLEEE
LKPLEEVLNLAQSKNFHLRPRDLISNINVIVLELKGSETTFMCEYADETATIVEFLNRWITF
SQSIISTLT
IL-2 Q22K variant sequence
(SEQ ID NO: 127)
APTSSSTKKTQLQLEHLLLDLKMILNGINNYKNPKLTRMLTFKFYMPKKATELKHLQCLEEE
LKPLEEVLNLAQSKNFHLRPRDLISNINVIVLELKGSETTFMCEYADETATIVEFLNRWITF
SQSIISTLT
IL-2 Q22Y variant sequence
(SEQ ID NO: 128)
APTSSSTKKTQLQLEHLLLDLYMILNGINNYKNPKLTRMLTFKFYMPKKATELKHLQCLEEE
LKPLEEVLNLAQSKNFHLRPRDLISNINVIVLELKGSETTFMCEYADETATIVEFLNRWITF
SQSIISTLT
IL-2 Q22I variant sequence
(SEQ ID NO: 129)
APTSSSTKKTQLQLEHLLLDLIMILNGINNYKNPKLTRMLTFKFYMPKKATELKHLQCLEEE
LKPLEEVLNLAQSKNFHLRPRDLISNINVIVLELKGSETTFMCEYADETATIVEFLNRWITF
SQSIISTLT
IL-2 L19H/Q126E variant sequence
(SEQ ID NO: 130)
APTSSSTKKTQLQLEHLLHDLQMILNGINNYKNPKLTRMLTFKFYMPKKATELKHLQCLEEE
LKPLEEVLNLAQSKNFHLRPRDLISNINVIVLELKGSETTFMCEYADETATIVEFLNRWITF
SESIISTLT
IL-2 L19Q/Q126E variant sequence
(SEQ ID NO: 131)
APTSSSTKKTQLQLEHLLQDLQMILNGINNYKNPKLTRMLTFKFYMPKKATELKHLQCLEEE
LKPLEEVLNLAQSKNFHLRPRDLISNINVIVLELKGSETTFMCEYADETATIVEFLNRWITF
SESIISTLT
IL-2 L19S/Q126E variant sequence
(SEQ ID NO: 132)
APTSSSTKKTQLQLEHLLSDLQMILNGINNYKNPKLTRMLTFKFYMPKKATELKHLQCLEEE
LKPLEEVLNLAQSKNFHLRPRDLISNINVIVLELKGSETTFMCEYADETATIVEFLNRWITF
SESIISTLT
IL-2 L19Y/Q126K variant sequence
(SEQ ID NO: 133)
APTSSSTKKTQLQLEHLLYDLQMILNGINNYKNPKLTRMLTFKFYMPKKATELKHLQCLEEE
LKPLEEVLNLAQSKNFHLRPRDLISNINVIVLELKGSETTFMCEYADETATIVEFLNRWITF
SKSIISTLT
IL-2 L19Y/Q126H variant sequence
(SEQ ID NO: 134)
APTSSSTKKTQLQLEHLLYDLQMILNGINNYKNPKLTRMLTFKFYMPKKATELKHLQCLEEE
LKPLEEVLNLAQSKNFHLRPRDLISNINVIVLELKGSETTFMCEYADETATIVEFLNRWITF
SHSIISTLT
IL-2 L19Y/Q126Y variant sequence
(SEQ ID NO: 135)
APTSSSTKKTQLQLEHLLYDLQMILNGINNYKNPKLTRMLTFKFYMPKKATELKHLQCLEEE
LKPLEEVLNLAQSKNFHLRPRDLISNINVIVLELKGSETTFMCEYADETATIVEFLNRWITF
SYSIISTLT
IL-2 L19Y/S125E variant sequence
(SEQ ID NO: 136)
APTSSSTKKTQLQLEHLLYDLQMILNGINNYKNPKLTRMLTFKFYMPKKATELKHLQCLEEE
LKPLEEVLNLAQSKNFHLRPRDLISNINVIVLELKGSETTFMCEYADETATIVEFLNRWITF
EQSIISTLT
IL-2 L19Y/S125K variant sequence
(SEQ ID NO: 137)
APTSSSTKKTQLQLEHLLYDLQMILNGINNYKNPKLTRMLTFKFYMPKKATELKHLQCLEEE
LKPLEEVLNLAQSKNFHLRPRDLISNINVIVLELKGSETTFMCEYADETATIVEFLNRWITF
KQSIISTLT
IL-2 L19Y/S125H variant sequence
(SEQ ID NO: 138)
APTSSSTKKTQLQLEHLLYDLQMILNGINNYKNPKLTRMLTFKFYMPKKATELKHLQCLEEE
LKPLEEVLNLAQSKNFHLRPRDLISNINVIVLELKGSETTFMCEYADETATIVEFLNRWITF
HQSIISTLT
IL-2 L19Y/S125W variant sequence
(SEQ ID NO: 139)
APTSSSTKKTQLQLEHLLYDLQMILNGINNYKNPKLTRMLTFKFYMPKKATELKHLQCLEEE
LKPLEEVLNLAQSKNFHLRPRDLISNINVIVLELKGSETTFMCEYADETATIVEFLNRWITF
WQSIISTLT
IL-2 L19Y/S125I variant sequence
(SEQ ID NO: 140)
APTSSSTKKTQLQLEHLLYDLQMILNGINNYKNPKLTRMLTFKFYMPKKATELKHLQCLEEE
LKPLEEVLNLAQSKNFHLRPRDLISNINVIVLELKGSETTFMCEYADETATIVEFLNRWITF
IQSIISTLT
IL-2 L19Y/Q22N variant sequence
(SEQ ID NO: 141)
APTSSSTKKTQLQLEHLLYDLNMILNGINNYKNPKLTRMLTFKFYMPKKATELKHLQCLEEE
LKPLEEVLNLAQSKNFHLRPRDLISNINVIVLELKGSETTFMCEYADETATIVEFLNRWITF
SQSIISTLT
IL-2 L19Y/Q22H variant sequence
(SEQ ID NO: 142)
APTSSSTKKTQLQLEHLLYDLHMILNGINNYKNPKLTRMLTFKFYMPKKATELKHLQCLEEE
LKPLEEVLNLAQSKNFHLRPRDLISNINVIVLELKGSETTFMCEYADETATIVEFLNRWITF
SQSIISTLT
IL-2 L19Y/Q22K variant sequence
(SEQ ID NO: 143)
APTSSSTKKTQLQLEHLLYDLKMILNGINNYKNPKLTRMLTFKFYMPKKATELKHLQCLEEE
LKPLEEVLNLAQSKNFHLRPRDLISNINVIVLELKGSETTFMCEYADETATIVEFLNRWITF
SQSIISTLT
IL-2 L19Y/Q22Y variant sequence
(SEQ ID NO: 144)
APTSSSTKKTQLQLEHLLYDLYMILNGINNYKNPKLTRMLTFKFYMPKKATELKHLQCLEEE
LKPLEEVLNLAQSKNFHLRPRDLISNINVIVLELKGSETTFMCEYADETATIVEFLNRWITF
SQSIISTLT
IL-2 L19Y/Q22I variant sequence
(SEQ ID NO: 145)
APTSSSTKKTQLQLEHLLYDLIMILNGINNYKNPKLTRMLTFKFYMPKKATELKHLQCLEEE
LKPLEEVLNLAQSKNFHLRPRDLISNINVIVLELKGSETTFMCEYADETATIVEFLNRWITF
SQSIISTLT
IL-2 L19H/Q126K variant sequence
(SEQ ID NO: 146)
APTSSSTKKTQLQLEHLLHDLQMILNGINNYKNPKLTRMLTFKFYMPKKATELKHLQCLEEE
LKPLEEVLNLAQSKNFHLRPRDLISNINVIVLELKGSETTFMCEYADETATIVEFLNRWITF
SKSIISTLT
IL-2 L19H/S125I variant sequence
(SEQ ID NO: 147)
APTSSSTKKTQLQLEHLLHDLQMILNGINNYKNPKLTRMLTFKFYMPKKATELKHLQCLEEE
LKPLEEVLNLAQSKNFHLRPRDLISNINVIVLELKGSETTFMCEYADETATIVEFLNRWITF
IQSIISTLT
IL-2 L19D/S125I variant sequence
(SEQ ID NO: 148)
APTSSSTKKTQLQLEHLLDDLQMILNGINNYKNPKLTRMLTFKFYMPKKATELKHLQCLEEE
LKPLEEVLNLAQSKNFHLRPRDLISNINVIVLELKGSETTFMCEYADETATIVEFLNRWITF
IQSIISTLT
IL-2 D20E/S125I variant sequence
(SEQ ID NO: 149)
APTSSSTKKTQLQLEHLLLELQMILNGINNYKNPKLTRMLTFKFYMPKKATELKHLQCLEEE
LKPLEEVLNLAQSKNFHLRPRDLISNINVIVLELKGSETTFMCEYADETATIVEFLNRWITF
IQSIISTLT
IL-2 D20T/S125I variant sequence
(SEQ ID NO: 150)
APTSSSTKKTQLQLEHLLLTLQMILNGINNYKNPKLTRMLTFKFYMPKKATELKHLQCLEEE
LKPLEEVLNLAQSKNFHLRPRDLISNINVIVLELKGSETTFMCEYADETATIVEFLNRWITF
IQSIISTLT
IL-2 L19Y/S125I/Q126E variant sequence
(SEQ ID NO: 151)
APTSSSTKKTQLQLEHLLYDLQMILNGINNYKNPKLTRMLTFKFYMPKKATELKHLQCLEEE
LKPLEEVLNLAQSKNFHLRPRDLISNINVIVLELKGSETTFMCEYADETATIVEFLNRWITF
IESIISTLT
P-0423
(SEQ ID NO: 152)
DKTHTCPPCPAPEAAGAPSVFLFPPKPKDTLMISRTPEVTCVVVDVSHEDPEVKFNWYVDGV
EVHNAKTKPREEQYNSTYRVVSVLTVLHQDWLNGKEYKCKVSNKALPAPIEKTISKAKGQPR
EPQVYTLPPSRDELTKNQVSLTCLVKGFYPSDIAVEWESNGQPENNYKTTPPVLDSDGSFFL
YSKLTVDKSRWQQGNVFSCSVMHEALHNHYTQKSLSLSPGGGGSGGGSAPTSSSTKKTQLQL
EHLLQDLQMILNGINNYKNPKLTRMLTFKFYMPKKATELKHLQCLEEELKPLEEVLNLAQSK
NFHLRPRDLISNINVIVLELKGSETTFMCEYADETATIVEFLNRWITFSQSIISTLT
P-0424
(SEQ ID NO: 153)
DKTHTCPPCPAPEAAGAPSVFLFPPKPKDTLMISRTPEVTCVVVDVSHEDPEVKFNWYVDGV
EVHNAKTKPREEQYNSTYRVVSVLTVLHQDWLNGKEYKCKVSNKALPAPIEKTISKAKGQPR
EPQVYTLPPSRDELTKNQVSLTCLVKGFYPSDIAVEWESNGQPENNYKTTPPVLDSDGSFFL
YSKLTVDKSRWQQGNVFSCSVMHEALHNHYTQKSLSLSPGGGGSGGGSAPTSSSIKKTQLQL
EHLLHDLQMILNGINNYKNPKLTRMLTFKFYMPKKATELKHLQCLEEELKPLEEVLNLAQSK
NFHLRPRDLISNINVIVLELKGSETTFMCEYADETATIVEFLNRWITFSQSIISTLT
P-0425
(SEQ ID NO: 154)
DKTHTCPPCPAPEAAGAPSVFLFPPKPKDTLMISRTPEVTCVVVDVSHEDPEVKFNWYVDGV
EVHNAKTKPREEQYNSTYRVVSVLTVLHQDWLNGKEYKCKVSNKALPAPIEKTISKAKGQPR
EPQVYTLPPSRDELTKNQVSLTCLVKGFYPSDIAVEWESNGQPENNYKTTPPVLDSDGSFFL
YSKLTVDKSRWQQGNVFSCSVMHEALHNHYTQKSLSLSPGGGGSGGGSAPTSSSIKKTQLQL
EHLLDDLQMILNGINNYKNPKLTRMLTFKFYMPKKATELKHLQCLEEELKPLEEVLNLAQSK
NFHLRPRDLISNINVIVLELKGSETTFMCEYADETATIVEFLNRWITFSQSIISTLT
P-0426
(SEQ ID NO: 155)
DKTHTCPPCPAPEAAGAPSVFLFPPKPKDTLMISRTPEVTCVVVDVSHEDPEVKFNWYVDGV
EVHNAKTKPREEQYNSTYRVVSVLTVLHQDWLNGKEYKCKVSNKALPAPIEKTISKAKGQPR
EPQVYTLPPSRDELTKNQVSLTCLVKGFYPSDIAVEWESNGQPENNYKTTPPVLDSDGSFFL
YSKLTVDKSRWQQGNVFSCSVMHEALHNHYTQKSLSLSPGGGGSGGGSAPTSSSIKKTQLQL
EHLLPDLQMILNGINNYKNPKLTRMLTFKFYMPKKATELKHLQCLEEELKPLEEVLNLAQSK
NFHLRPRDLISNINVIVLELKGSETTFMCEYADETATIVEFLNRWITFSQSIISTLT
P-0427
(SEQ ID NO: 156)
DKTHTCPPCPAPEAAGAPSVFLFPPKPKDTLMISRTPEVTCVVVDVSHEDPEVKFNWYVDGV
EVHNAKTKPREEQYNSTYRVVSVLTVLHQDWLNGKEYKCKVSNKALPAPIEKTISKAKGQPR
EPQVYTLPPSRDELTKNQVSLTCLVKGFYPSDIAVEWESNGQPENNYKTTPPVLDSDGSFFL
YSKLTVDKSRWQQGNVFSCSVMHEALHNHYTQKSLSLSPGGGGSGGGSAPTSSSIKKTQLQL
EHLLSDLQMILNGINNYKNPKLTRMLTFKFYMPKKATELKHLQCLEEELKPLEEVLNLAQSK
NFHLRPRDLISNINVIVLELKGSETTFMCEYADETATIVEFLNRWITFSQSIISTLT
P-0428
(SEQ ID NO: 157)
DKTHTCPPCPAPEAAGAPSVFLFPPKPKDTLMISRTPEVTCVVVDVSHEDPEVKFNWYVDGV
EVHNAKTKPREEQYNSTYRVVSVLTVLHQDWLNGKEYKCKVSNKALPAPIEKTISKAKGQPR
EPQVYTLPPSRDELTKNQVSLTCLVKGFYPSDIAVEWESNGQPENNYKTTPPVLDSDGSFFL
YSKLTVDKSRWQQGNVFSCSVMHEALHNHYTQKSLSLSPGGGGSGGGSAPTSSSIKKTQLQL
EHLLLDSQMILNGINNYKNPKLTRMLTFKFYMPKKATELKHLQCLEEELKPLEEVLNLAQSK
NFHLRPRDLISNINVIVLELKGSETTFMCEYADETATIVEFLNRWITFSQSIISTLT
P-0429
(SEQ ID NO: 158)
DKTHTCPPCPAPEAAGAPSVFLFPPKPKDTLMISRTPEVTCVVVDVSHEDPEVKFNWYVDGV
EVHNAKTKPREEQYNSTYRVVSVLTVLHQDWLNGKEYKCKVSNKALPAPIEKTISKAKGQPR
EPQVYTLPPSRDELTKNQVSLTCLVKGFYPSDIAVEWESNGQPENNYKTTPPVLDSDGSFFL
YSKLTVDKSRWQQGNVFSCSVMHEALHNHYTQKSLSLSPGGGGSGGGSAPTSSSIKKTQLQL
EHLLLDNQMILNGINNYKNPKLTRMLTFKFYMPKKATELKHLQCLEEELKPLEEVLNLAQSK
NFHLRPRDLISNINVIVLELKGSETTFMCEYADETATIVEFLNRWITFSQSIISTLT
P-0430
(SEQ ID NO: 159)
DKTHTCPPCPAPEAAGAPSVFLFPPKPKDTLMISRTPEVTCVVVDVSHEDPEVKFNWYVDGV
EVHNAKTKPREEQYNSTYRVVSVLTVLHQDWLNGKEYKCKVSNKALPAPIEKTISKAKGQPR
EPQVYTLPPSRDELTKNQVSLTCLVKGFYPSDIAVEWESNGQPENNYKTTPPVLDSDGSFFL
YSKLTVDKSRWQQGNVFSCSVMHEALHNHYTQKSLSLSPGGGGSGGGSAPTSSSIKKTQLQL
EHLLLDRQMILNGINNYKNPKLTRMLTFKFYMPKKATELKHLQCLEEELKPLEEVLNLAQSK
NFHLRPRDLISNINVIVLELKGSETTFMCEYADETATIVEFLNRWITFSQSIISTLT
P-0497
(SEQ ID NO: 160)
DKTHTCPPCPAPEAAGAPSVFLFPPKPKDTLMISRTPEVTCVVVDVSHEDPEVKFNWYVDGV
EVHNAKTKPREEQYNSTYRVVSVLTVLHQDWLNGKEYKCKVSNKALPAPIEKTISKAKGQPR
EPQVYTLPPSRDELTKNQVSLTCLVKGFYPSDIAVEWESNGQPENNYKTTPPVLDSDGSFFL
YSKLTVDKSRWQQGNVFSCSVMHEALHNHYTQKSLSLSPGGGGSGGGSAPTSSSIKKTQLQL
EHLLLDLQMILNGINNYKNPKLTRMLTFKFYMPKKATELKHLQCLEEELKPLEEVLNLAQSK
NFHLRPRDLISNINVIVLELKGSETTFMCEYADETATIVEFLNRWITFSKSIISTLT
P-0498
(SEQ ID NO: 161)
DKTHTCPPCPAPEAAGAPSVFLFPPKPKDTLMISRTPEVTCVVVDVSHEDPEVKFNWYVDGV
EVHNAKTKPREEQYNSTYRVVSVLTVLHQDWLNGKEYKCKVSNKALPAPIEKTISKAKGQPR
EPQVYTLPPSRDELTKNQVSLTCLVKGFYPSDIAVEWESNGQPENNYKTTPPVLDSDGSFFL
YSKLTVDKSRWQQGNVFSCSVMHEALHNHYTQKSLSLSPGGGGSGGGSAPTSSSIKKTQLQL
EHLLLDLQMILNGINNYKNPKLTRMLTFKFYMPKKATELKHLQCLEEELKPLEEVLNLAQSK
NFHLRPRDLISNINVIVLELKGSETTFMCEYADETATIVEFLNRWITFSHSIISTLT
P-0499
(SEQ ID NO: 162)
DKTHTCPPCPAPEAAGAPSVFLFPPKPKDTLMISRTPEVTCVVVDVSHEDPEVKFNWYVDGV
EVHNAKTKPREEQYNSTYRVVSVLTVLHQDWLNGKEYKCKVSNKALPAPIEKTISKAKGQPR
EPQVYTLPPSRDELTKNQVSLTCLVKGFYPSDIAVEWESNGQPENNYKTTPPVLDSDGSFFL
YSKLTVDKSRWQQGNVFSCSVMHEALHNHYTQKSLSLSPGGGGSGGGSAPTSSSIKKTQLQL
EHLLLDLQMILNGINNYKNPKLTRMLTFKFYMPKKATELKHLQCLEEELKPLEEVLNLAQSK
NFHLRPRDLISNINVIVLELKGSETTFMCEYADETATIVEFLNRWITFSYSIISTLT
P-0500
(SEQ ID NO: 163)
DKTHTCPPCPAPEAAGAPSVFLFPPKPKDTLMISRTPEVTCVVVDVSHEDPEVKFNWYVDGV
EVHNAKTKPREEQYNSTYRVVSVLTVLHQDWLNGKEYKCKVSNKALPAPIEKTISKAKGQPR
EPQVYTLPPSRDELTKNQVSLTCLVKGFYPSDIAVEWESNGQPENNYKTTPPVLDSDGSFFL
YSKLTVDKSRWQQGNVFSCSVMHEALHNHYTQKSLSLSPGGGGSGGGSAPTSSSIKKTQLQL
EHLLLDLQMILNGINNYKNPKLTRMLTFKFYMPKKATELKHLQCLEEELKPLEEVLNLAQSK
NFHLRPRDLISNINVIVLELKGSETTFMCEYADETATIVEFLNRWITFEQSIISTLT
P-0501
(SEQ ID NO: 164)
DKTHTCPPCPAPEAAGAPSVFLFPPKPKDTLMISRTPEVTCVVVDVSHEDPEVKFNWYVDGV
EVHNAKTKPREEQYNSTYRVVSVLTVLHQDWLNGKEYKCKVSNKALPAPIEKTISKAKGQPR
EPQVYTLPPSRDELTKNQVSLTCLVKGFYPSDIAVEWESNGQPENNYKTTPPVLDSDGSFFL
YSKLTVDKSRWQQGNVFSCSVMHEALHNHYTQKSLSLSPGGGGSGGGSAPTSSSIKKTQLQL
EHLLLDLQMILNGINNYKNPKLTRMLTFKFYMPKKATELKHLQCLEEELKPLEEVLNLAQSK
NFHLRPRDLISNINVIVLELKGSETTFMCEYADETATIVEFLNRWITFKQSIISTLT
P-0502
(SEQ ID NO: 165)
DKTHTCPPCPAPEAAGAPSVFLFPPKPKDTLMISRTPEVTCVVVDVSHEDPEVKFNWYVDGV
EVHNAKTKPREEQYNSTYRVVSVLTVLHQDWLNGKEYKCKVSNKALPAPIEKTISKAKGQPR
EPQVYTLPPSRDELTKNQVSLTCLVKGFYPSDIAVEWESNGQPENNYKTTPPVLDSDGSFFL
YSKLTVDKSRWQQGNVFSCSVMHEALHNHYTQKSLSLSPGGGGSGGGSAPTSSSIKKTQLQL
EHLLLDLQMILNGINNYKNPKLTRMLTFKFYMPKKATELKHLQCLEEELKPLEEVLNLAQSK
NFHLRPRDLISNINVIVLELKGSETTFMCEYADETATIVEFLNRWITFHQSIISTLT
P-0503
(SEQ ID NO: 166)
DKTHTCPPCPAPEAAGAPSVFLFPPKPKDTLMISRTPEVTCVVVDVSHEDPEVKFNWYVDGV
EVHNAKTKPREEQYNSTYRVVSVLTVLHQDWLNGKEYKCKVSNKALPAPIEKTISKAKGQPR
EPQVYTLPPSRDELTKNQVSLTCLVKGFYPSDIAVEWESNGQPENNYKTTPPVLDSDGSFFL
YSKLTVDKSRWQQGNVFSCSVMHEALHNHYTQKSLSLSPGGGGSGGGSAPTSSSIKKTQLQL
EHLLLDLQMILNGINNYKNPKLTRMLTFKFYMPKKATELKHLQCLEEELKPLEEVLNLAQSK
NFHLRPRDLISNINVIVLELKGSETTFMCEYADETATIVEFLNRWITFWQSIISTLT
P-0531
(SEQ ID NO: 167)
DKTHTCPPCPAPEAAGAPSVFLFPPKPKDTLMISRTPEVTCVVVDVSHEDPEVKFNWYVDGV
EVHNAKTKPREEQYNSTYRVVSVLTVLHQDWLNGKEYKCKVSNKALPAPIEKTISKAKGQPR
EPQVYTLPPSRDELTKNQVSLTCLVKGFYPSDIAVEWESNGQPENNYKTTPPVLDSDGSFFL
YSKLTVDKSRWQQGNVFSCSVMHEALHNHYTQKSLSLSPGGGGSGGGSAPTSSSIKKTQLQL
EHLLLDLQMILNGINNYKNPKLTRMLTFKFYMPKKATELKHLQCLEEELKPLEEVLNLAQSK
NFHLRPRDLISNINVIVLELKGSETTFMCEYADETATIVEFLNRWITFIQSIISTLT
P-0505
(SEQ ID NO: 168)
DKTHTCPPCPAPEAAGAPSVFLFPPKPKDTLMISRTPEVTCVVVDVSHEDPEVKFNWYVDGV
EVHNAKTKPREEQYNSTYRVVSVLTVLHQDWLNGKEYKCKVSNKALPAPIEKTISKAKGQPR
EPQVYTLPPSRDELTKNQVSLTCLVKGFYPSDIAVEWESNGQPENNYKTTPPVLDSDGSFFL
YSKLTVDKSRWQQGNVFSCSVMHEALHNHYTQKSLSLSPGGGGSGGGSAPTSSSIKKTQLQL
EHLLLDLNMILNGINNYKNPKLTRMLTFKFYMPKKATELKHLQCLEEELKPLEEVLNLAQSK
NFHLRPRDLISNINVIVLELKGSETTFMCEYADETATIVEFLNRWITFSQSIISTLT
P-0506
(SEQ ID NO: 169)
DKTHTCPPCPAPEAAGAPSVFLFPPKPKDTLMISRTPEVTCVVVDVSHEDPEVKFNWYVDGV
EVHNAKTKPREEQYNSTYRVVSVLTVLHQDWLNGKEYKCKVSNKALPAPIEKTISKAKGQPR
EPQVYTLPPSRDELTKNQVSLTCLVKGFYPSDIAVEWESNGQPENNYKTTPPVLDSDGSFFL
YSKLTVDKSRWQQGNVFSCSVMHEALHNHYTQKSLSLSPGGGGSGGGSAPTSSSIKKTQLQL
EHLLLDLHMILNGINNYKNPKLTRMLTFKFYMPKKATELKHLQCLEEELKPLEEVLNLAQSK
NFHLRPRDLISNINVIVLELKGSETTFMCEYADETATIVEFLNRWITFSQSIISTLT
P-0507
(SEQ ID NO: 170)
DKTHTCPPCPAPEAAGAPSVFLFPPKPKDTLMISRTPEVTCVVVDVSHEDPEVKFNWYVDGV
EVHNAKTKPREEQYNSTYRVVSVLTVLHQDWLNGKEYKCKVSNKALPAPIEKTISKAKGQPR
EPQVYTLPPSRDELTKNQVSLTCLVKGFYPSDIAVEWESNGQPENNYKTTPPVLDSDGSFFL
YSKLTVDKSRWQQGNVFSCSVMHEALHNHYTQKSLSLSPGGGGSGGGSAPTSSSIKKTQLQL
EHLLLDLKMILNGINNYKNPKLTRMLTFKFYMPKKATELKHLQCLEEELKPLEEVLNLAQSK
NFHLRPRDLISNINVIVLELKGSETTFMCEYADETATIVEFLNRWITFSQSIISTLT
P-0508
(SEQ ID NO: 171)
DKTHTCPPCPAPEAAGAPSVFLFPPKPKDTLMISRTPEVTCVVVDVSHEDPEVKFNWYVDGV
EVHNAKTKPREEQYNSTYRVVSVLTVLHQDWLNGKEYKCKVSNKALPAPIEKTISKAKGQPR
EPQVYTLPPSRDELTKNQVSLTCLVKGFYPSDIAVEWESNGQPENNYKTTPPVLDSDGSFFL
YSKLTVDKSRWQQGNVFSCSVMHEALHNHYTQKSLSLSPGGGGSGGGSAPTSSSIKKTQLQL
EHLLLDLYMILNGINNYKNPKLTRMLTFKFYMPKKATELKHLQCLEEELKPLEEVLNLAQSK
NFHLRPRDLISNINVIVLELKGSETTFMCEYADETATIVEFLNRWITFSQSIISTLT
P-0509
(SEQ ID NO: 172)
DKTHTCPPCPAPEAAGAPSVFLFPPKPKDTLMISRTPEVTCVVVDVSHEDPEVKFNWYVDGV
EVHNAKTKPREEQYNSTYRVVSVLTVLHQDWLNGKEYKCKVSNKALPAPIEKTISKAKGQPR
EPQVYTLPPSRDELTKNQVSLTCLVKGFYPSDIAVEWESNGQPENNYKTTPPVLDSDGSFFL
YSKLTVDKSRWQQGNVFSCSVMHEALHNHYTQKSLSLSPGGGGSGGGSAPTSSSIKKTQLQL
EHLLLDLIMILNGINNYKNPKLTRMLTFKFYMPKKATELKHLQCLEEELKPLEEVLNLAQSK
NFHLRPRDLISNINVIVLELKGSETTFMCEYADETATIVEFLNRWITFSQSIISTLT
P-0447
(SEQ ID NO: 173)
DKTHTCPPCPAPEAAGAPSVFLFPPKPKDTLMISRTPEVTCVVVDVSHEDPEVKFNWYVDGV
EVHNAKTKPREEQYNSTYRVVSVLTVLHQDWLNGKEYKCKVSNKALPAPIEKTISKAKGQPR
EPQVYTLPPSRDELTKNQVSLTCLVKGFYPSDIAVEWESNGQPENNYKTTPPVLDSDGSFFL
YSKLTVDKSRWQQGNVFSCSVMHEALHNHYTQKSLSLSPGGGGSGGGSAPTSSSIKKTQLQL
EHLLHDLQMILNGINNYKNPKLTRMLTFKFYMPKKATELKHLQCLEEELKPLEEVLNLAQSK
NFHLRPRDLISNINVIVLELKGSETTFMCEYADETATIVEFLNRWITFSESIISTLT
P-0448
(SEQ ID NO: 174)
DKTHTCPPCPAPEAAGAPSVFLFPPKPKDTLMISRTPEVTCVVVDVSHEDPEVKFNWYVDGV
EVHNAKTKPREEQYNSTYRVVSVLTVLHQDWLNGKEYKCKVSNKALPAPIEKTISKAKGQPR
EPQVYTLPPSRDELTKNQVSLTCLVKGFYPSDIAVEWESNGQPENNYKTTPPVLDSDGSFFL
YSKLTVDKSRWQQGNVFSCSVMHEALHNHYTQKSLSLSPGGGGSGGGSAPTSSSIKKTQLQL
EHLLQDLQMILNGINNYKNPKLTRMLTFKFYMPKKATELKHLQCLEEELKPLEEVLNLAQSK
NFHLRPRDLISNINVIVLELKGSETTFMCEYADETATIVEFLNRWITFSESIISTLT
P-0449
(SEQ ID NO: 175)
DKTHTCPPCPAPEAAGAPSVFLFPPKPKDTLMISRTPEVTCVVVDVSHEDPEVKFNWYVDGV
EVHNAKTKPREEQYNSTYRVVSVLTVLHQDWLNGKEYKCKVSNKALPAPIEKTISKAKGQPR
EPQVYTLPPSRDELTKNQVSLTCLVKGFYPSDIAVEWESNGQPENNYKTTPPVLDSDGSFFL
YSKLTVDKSRWQQGNVFSCSVMHEALHNHYTQKSLSLSPGGGGSGGGSAPTSSSIKKTQLQL
EHLLSDLQMILNGINNYKNPKLTRMLTFKFYMPKKATELKHLQCLEEELKPLEEVLNLAQSK
NFHLRPRDLISNINVIVLELKGSETTFMCEYADETATIVEFLNRWITFSESIISTLT
P-0464
(SEQ ID NO: 176)
DKTHTCPPCPAPEAAGAPSVFLFPPKPKDTLMISRTPEVTCVVVDVSHEDPEVKFNWYVDGV
EVHNAKTKPREEQYNSTYRVVSVLTVLHQDWLNGKEYKCKVSNKALPAPIEKTISKAKGQPR
EPQVYTLPPSRDELTKNQVSLTCLVKGFYPSDIAVEWESNGQPENNYKTTPPVLDSDGSFFL
YSKLTVDKSRWQQGNVFSCSVMHEALHNHYTQKSLSLSPGGGGSGGGSAPTSSSIKKTQLQL
EHLLYDLQMILNGINNYKNPKLTRMLTFKFYMPKKATELKHLQCLEEELKPLEEVLNLAQSK
NFHLRPRDLISNINVIVLELKGSETTFMCEYADETATIVEFLNRWITFSKSIISTLT
P-0465
(SEQ ID NO: 177)
DKTHTCPPCPAPEAAGAPSVFLFPPKPKDTLMISRTPEVTCVVVDVSHEDPEVKFNWYVDGV
EVHNAKTKPREEQYNSTYRVVSVLTVLHQDWLNGKEYKCKVSNKALPAPIEKTISKAKGQPR
EPQVYTLPPSRDELTKNQVSLTCLVKGFYPSDIAVEWESNGQPENNYKTTPPVLDSDGSFFL
YSKLTVDKSRWQQGNVFSCSVMHEALHNHYTQKSLSLSPGGGGSGGGSAPTSSSIKKTQLQL
EHLLYDLQMILNGINNYKNPKLTRMLTFKFYMPKKATELKHLQCLEEELKPLEEVLNLAQSK
NFHLRPRDLISNINVIVLELKGSETTFMCEYADETATIVEFLNRWITFSHSIISTLT
P-0466
(SEQ ID NO: 178)
DKTHTCPPCPAPEAAGAPSVFLFPPKPKDTLMISRTPEVTCVVVDVSHEDPEVKFNWYVDGV
EVHNAKTKPREEQYNSTYRVVSVLTVLHQDWLNGKEYKCKVSNKALPAPIEKTISKAKGQPR
EPQVYTLPPSRDELTKNQVSLTCLVKGFYPSDIAVEWESNGQPENNYKTTPPVLDSDGSFFL
YSKLTVDKSRWQQGNVFSCSVMHEALHNHYTQKSLSLSPGGGGSGGGSAPTSSSIKKTQLQL
EHLLYDLQMILNGINNYKNPKLTRMLTFKFYMPKKATELKHLQCLEEELKPLEEVLNLAQSK
NFHLRPRDLISNINVIVLELKGSETTFMCEYADETATIVEFLNRWITFSYSIISTLT
P-0467
(SEQ ID NO: 179)
DKTHTCPPCPAPEAAGAPSVFLFPPKPKDTLMISRTPEVTCVVVDVSHEDPEVKFNWYVDGV
EVHNAKTKPREEQYNSTYRVVSVLTVLHQDWLNGKEYKCKVSNKALPAPIEKTISKAKGQPR
EPQVYTLPPSRDELTKNQVSLTCLVKGFYPSDIAVEWESNGQPENNYKTTPPVLDSDGSFFL
YSKLTVDKSRWQQGNVFSCSVMHEALHNHYTQKSLSLSPGGGGSGGGSAPTSSSIKKTQLQL
EHLLYDLQMILNGINNYKNPKLTRMLTFKFYMPKKATELKHLQCLEEELKPLEEVLNLAQSK
NFHLRPRDLISNINVIVLELKGSETTFMCEYADETATIVEFLNRWITFEQSIISTLT
P-0468
(SEQ ID NO: 180)
DKTHTCPPCPAPEAAGAPSVFLFPPKPKDTLMISRTPEVTCVVVDVSHEDPEVKFNWYVDGV
EVHNAKTKPREEQYNSTYRVVSVLTVLHQDWLNGKEYKCKVSNKALPAPIEKTISKAKGQPR
EPQVYTLPPSRDELTKNQVSLTCLVKGFYPSDIAVEWESNGQPENNYKTTPPVLDSDGSFFL
YSKLTVDKSRWQQGNVFSCSVMHEALHNHYTQKSLSLSPGGGGSGGGSAPTSSSIKKTQLQL
EHLLYDLQMILNGINNYKNPKLTRMLTFKFYMPKKATELKHLQCLEEELKPLEEVLNLAQSK
NFHLRPRDLISNINVIVLELKGSETTFMCEYADETATIVEFLNRWITFKQSIISTLT
P-0469
(SEQ ID NO: 181)
DKTHTCPPCPAPEAAGAPSVFLFPPKPKDTLMISRTPEVTCVVVDVSHEDPEVKFNWYVDGV
EVHNAKTKPREEQYNSTYRVVSVLTVLHQDWLNGKEYKCKVSNKALPAPIEKTISKAKGQPR
EPQVYTLPPSRDELTKNQVSLTCLVKGFYPSDIAVEWESNGQPENNYKTTPPVLDSDGSFFL
YSKLTVDKSRWQQGNVFSCSVMHEALHNHYTQKSLSLSPGGGGSGGGSAPTSSSIKKTQLQL
EHLLYDLQMILNGINNYKNPKLTRMLTFKFYMPKKATELKHLQCLEEELKPLEEVLNLAQSK
NFHLRPRDLISNINVIVLELKGSETTFMCEYADETATIVEFLNRWITFHQSIISTLT
P-0470
(SEQ ID NO: 182)
DKTHTCPPCPAPEAAGAPSVFLFPPKPKDTLMISRTPEVTCVVVDVSHEDPEVKFNWYVDGV
EVHNAKTKPREEQYNSTYRVVSVLTVLHQDWLNGKEYKCKVSNKALPAPIEKTISKAKGQPR
EPQVYTLPPSRDELTKNQVSLTCLVKGFYPSDIAVEWESNGQPENNYKTTPPVLDSDGSFFL
YSKLTVDKSRWQQGNVFSCSVMHEALHNHYTQKSLSLSPGGGGSGGGSAPTSSSIKKTQLQL
EHLLYDLQMILNGINNYKNPKLTRMLTFKFYMPKKATELKHLQCLEEELKPLEEVLNLAQSK
NFHLRPRDLISNINVIVLELKGSETTFMCEYADETATIVEFLNRWITFWQSIISTLT
P-0471
(SEQ ID NO: 183)
DKTHTCPPCPAPEAAGAPSVFLFPPKPKDTLMISRTPEVTCVVVDVSHEDPEVKFNWYVDGV
EVHNAKTKPREEQYNSTYRVVSVLTVLHQDWLNGKEYKCKVSNKALPAPIEKTISKAKGQPR
EPQVYTLPPSRDELTKNQVSLTCLVKGFYPSDIAVEWESNGQPENNYKTTPPVLDSDGSFFL
YSKLTVDKSRWQQGNVFSCSVMHEALHNHYTQKSLSLSPGGGGSGGGSAPTSSSIKKTQLQL
EHLLYDLQMILNGINNYKNPKLTRMLTFKFYMPKKATELKHLQCLEEELKPLEEVLNLAQSK
NFHLRPRDLISNINVIVLELKGSETTFMCEYADETATIVEFLNRWITFIQSIISTLT
P-0472
(SEQ ID NO: 184)
DKTHTCPPCPAPEAAGAPSVFLFPPKPKDTLMISRTPEVTCVVVDVSHEDPEVKFNWYVDGV
EVHNAKTKPREEQYNSTYRVVSVLTVLHQDWLNGKEYKCKVSNKALPAPIEKTISKAKGQPR
EPQVYTLPPSRDELTKNQVSLTCLVKGFYPSDIAVEWESNGQPENNYKTTPPVLDSDGSFFL
YSKLTVDKSRWQQGNVFSCSVMHEALHNHYTQKSLSLSPGGGGSGGGSAPTSSSIKKTQLQL
EHLLYDLNMILNGINNYKNPKLTRMLTFKFYMPKKATELKHLQCLEEELKPLEEVLNLAQSK
NFHLRPRDLISNINVIVLELKGSETTFMCEYADETATIVEFLNRWITFSQSIISTLT
P-0473
(SEQ ID NO: 185)
DKTHTCPPCPAPEAAGAPSVFLFPPKPKDTLMISRTPEVTCVVVDVSHEDPEVKFNWYVDGV
EVHNAKTKPREEQYNSTYRVVSVLTVLHQDWLNGKEYKCKVSNKALPAPIEKTISKAKGQPR
EPQVYTLPPSRDELTKNQVSLTCLVKGFYPSDIAVEWESNGQPENNYKTTPPVLDSDGSFFL
YSKLTVDKSRWQQGNVFSCSVMHEALHNHYTQKSLSLSPGGGGSGGGSAPTSSSIKKTQLQL
EHLLYDLHMILNGINNYKNPKLTRMLTFKFYMPKKATELKHLQCLEEELKPLEEVLNLAQSK
NFHLRPRDLISNINVIVLELKGSETTFMCEYADETATIVEFLNRWITFSQSIISTLT
P-0474
(SEQ ID NO: 186)
DKTHTCPPCPAPEAAGAPSVFLFPPKPKDTLMISRTPEVTCVVVDVSHEDPEVKFNWYVDGV
EVHNAKTKPREEQYNSTYRVVSVLTVLHQDWLNGKEYKCKVSNKALPAPIEKTISKAKGQPR
EPQVYTLPPSRDELTKNQVSLTCLVKGFYPSDIAVEWESNGQPENNYKTTPPVLDSDGSFFL
YSKLTVDKSRWQQGNVFSCSVMHEALHNHYTQKSLSLSPGGGGSGGGSAPTSSSIKKTQLQL
EHLLYDLKMILNGINNYKNPKLTRMLTFKFYMPKKATELKHLQCLEEELKPLEEVLNLAQSK
NFHLRPRDLISNINVIVLELKGSETTFMCEYADETATIVEFLNRWITFSQSIISTLT
P-0475
(SEQ ID NO: 187)
DKTHTCPPCPAPEAAGAPSVFLFPPKPKDTLMISRTPEVTCVVVDVSHEDPEVKFNWYVDGV
EVHNAKTKPREEQYNSTYRVVSVLTVLHQDWLNGKEYKCKVSNKALPAPIEKTISKAKGQPR
EPQVYTLPPSRDELTKNQVSLTCLVKGFYPSDIAVEWESNGQPENNYKTTPPVLDSDGSFFL
YSKLTVDKSRWQQGNVFSCSVMHEALHNHYTQKSLSLSPGGGGSGGGSAPTSSSIKKTQLQL
EHLLYDLYMILNGINNYKNPKLTRMLTFKFYMPKKATELKHLQCLEEELKPLEEVLNLAQSK
NFHLRPRDLISNINVIVLELKGSETTFMCEYADETATIVEFLNRWITFSQSIISTLT
P-0476
(SEQ ID NO: 188)
DKTHTCPPCPAPEAAGAPSVFLFPPKPKDTLMISRTPEVTCVVVDVSHEDPEVKFNWYVDGV
EVHNAKTKPREEQYNSTYRVVSVLTVLHQDWLNGKEYKCKVSNKALPAPIEKTISKAKGQPR
EPQVYTLPPSRDELTKNQVSLTCLVKGFYPSDIAVEWESNGQPENNYKTTPPVLDSDGSFFL
YSKLTVDKSRWQQGNVFSCSVMHEALHNHYTQKSLSLSPGGGGSGGGSAPTSSSIKKTQLQL
EHLLYDLIMILNGINNYKNPKLTRMLTFKFYMPKKATELKHLQCLEEELKPLEEVLNLAQSK
NFHLRPRDLISNINVIVLELKGSETTFMCEYADETATIVEFLNRWITFSQSIISTLT
P-0480
(SEQ ID NO: 189)
DKTHTCPPCPAPEAAGAPSVFLFPPKPKDTLMISRTPEVTCVVVDVSHEDPEVKFNWYVDGV
EVHNAKTKPREEQYNSTYRVVSVLTVLHQDWLNGKEYKCKVSNKALPAPIEKTISKAKGQPR
EPQVYTLPPSRDELTKNQVSLTCLVKGFYPSDIAVEWESNGQPENNYKTTPPVLDSDGSFFL
YSKLTVDKSRWQQGNVFSCSVMHEALHNHYTQKSLSLSPGGGGSGGGSAPTSSSIKKTQLQL
EHLLHDLQMILNGINNYKNPKLTRMLTFKFYMPKKATELKHLQCLEEELKPLEEVLNLAQSK
NFHLRPRDLISNINVIVLELKGSETTFMCEYADETATIVEFLNRWITFSKSIISTLT
P-0491
(SEQ ID NO: 190)
DKTHTCPPCPAPEAAGAPSVFLFPPKPKDTLMISRTPEVTCVVVDVSHEDPEVKFNWYVDGV
EVHNAKTKPREEQYNSTYRVVSVLTVLHQDWLNGKEYKCKVSNKALPAPIEKTISKAKGQPR
EPQVYTLPPSRDELTKNQVSLTCLVKGFYPSDIAVEWESNGQPENNYKTTPPVLDSDGSFFL
YSKLTVDKSRWQQGNVFSCSVMHEALHNHYTQKSLSLSPGGGGSGGGSAPTSSSIKKTQLQL
EHLLHDLQMILNGINNYKNPKLTRMLTFKFYMPKKATELKHLQCLEEELKPLEEVLNLAQSK
NFHLRPRDLISNINVIVLELKGSETTFMCEYADETATIVEFLNRWITFIQSIISTLT
P-0492
(SEQ ID NO: 191)
DKTHTCPPCPAPEAAGAPSVFLFPPKPKDTLMISRTPEVTCVVVDVSHEDPEVKFNWYVDGV
EVHNAKTKPREEQYNSTYRVVSVLTVLHQDWLNGKEYKCKVSNKALPAPIEKTISKAKGQPR
EPQVYTLPPSRDELTKNQVSLTCLVKGFYPSDIAVEWESNGQPENNYKTTPPVLDSDGSFFL
YSKLTVDKSRWQQGNVFSCSVMHEALHNHYTQKSLSLSPGGGGSGGGSAPTSSSTKKTQLQL
EHLLDDLQMILNGINNYKNPKLTRMLTFKFYMPKKATELKHLQCLEEELKPLEEVLNLAQSK
NFHLRPRDLISNINVIVLELKGSETTFMCEYADETATIVEFLNRWITFIQSIISTLT
P-0493
(SEQ ID NO: 192)
DKTHTCPPCPAPEAAGAPSVFLFPPKPKDTLMISRTPEVTCVVVDVSHEDPEVKFNWYVDGV
EVHNAKTKPREEQYNSTYRVVSVLTVLHQDWLNGKEYKCKVSNKALPAPIEKTISKAKGQPR
EPQVYTLPPSRDELTKNQVSLTCLVKGFYPSDIAVEWESNGQPENNYKTTPPVLDSDGSFFL
YSKLTVDKSRWQQGNVFSCSVMHEALHNHYTQKSLSLSPGGGGSGGGSAPTSSSTKKTQLQL
EHLLLELQMILNGINNYKNPKLTRMLTFKFYMPKKATELKHLQCLEEELKPLEEVLNLAQSK
NFHLRPRDLISNINVIVLELKGSETTFMCEYADETATIVEFLNRWITFIQSIISTLT
P-0494
(SEQ ID NO: 193)
DKTHTCPPCPAPEAAGAPSVFLFPPKPKDTLMISRTPEVTCVVVDVSHEDPEVKFNWYVDGV
EVHNAKTKPREEQYNSTYRVVSVLTVLHQDWLNGKEYKCKVSNKALPAPIEKTISKAKGQPR
EPQVYTLPPSRDELTKNQVSLTCLVKGFYPSDIAVEWESNGQPENNYKTTPPVLDSDGSFFL
YSKLTVDKSRWQQGNVFSCSVMHEALHNHYTQKSLSLSPGGGGSGGGSAPTSSSTKKTQLQL
EHLLLTLQMILNGINNYKNPKLTRMLTFKFYMPKKATELKHLQCLEEELKPLEEVLNLAQSK
NFHLRPRDLISNINVIVLELKGSETTFMCEYADETATIVEFLNRWITFIQSIISTLT
P-0495
(SEQ ID NO: 194)
DKTHTCPPCPAPEAAGAPSVFLFPPKPKDTLMISRTPEVTCVVVDVSHEDPEVKFNWYVDGV
EVHNAKTKPREEQYNSTYRVVSVLTVLHQDWLNGKEYKCKVSNKALPAPIEKTISKAKGQPR
EPQVYTLPPSRDELTKNQVSLTCLVKGFYPSDIAVEWESNGQPENNYKTTPPVLDSDGSFFL
YSKLTVDKSRWQQGNVFSCSVMHEALHNHYTQKSLSLSPGGGGSGGGSAPTSSSTKKTQLQL
EHLLYDLQMILNGINNYKNPKLTRMLTFKFYMPKKATELKHLQCLEEELKPLEEVLNLAQSK
NFHLRPRDLISNINVIVLELKGSETTFMCEYADETATIVEFLNRWITFIESIISTLT
P-0496 (Benchmark-2)
(SEQ ID NO: 195)
APTSSSTKKTQLQLEHLLLDLQMILNGINNYKNPKLTRMLTFKFYMPKKATELKHLQCLEEE
LKPLEEVLNLAQSKNFHLRPRDLISRINVIVLELKGSETTFMCEYADETATIVEFLNRWITF
SQSIISTLTGGGGSGGGGSGGGGSGGGGSCPPCPAPEAAGAPSVFLFPPKPKDTLMISRTPE
VTCVVVDVSHEDPEVKFNWYVDGVEVHNAKTKPREEQYNSTYRVVSVLTVLHQDWLNGKEYK
CKVSNKALPAPIEKTISKAKGQPREPQVYTLPPSRDELTKNQVSLTCLVKGFYPSDIAVEWE
SNGQPENNYKTTPPVLDSDGSFFLYSKLTVDKSRWQQGNVFSCSVMHEALHNHYTQKSLSLS
PG
P-0482-Hole chain
(SEQ ID NO: 196)
DKTHTCPPCPAPEAAGAPSVFLFPPKPKDTLMISRTPEVTCVVVDVSHEDPEVKFNWYVDGV
EVHNAKTKPREEQYNSTYRVVSVLTVLHQDWLNGKEYKCKVSNKALPAPIEKTISKAKGQPR
EPQVYTLPPCREEMTKNQVSLSCAVKGFYPSDIAVEWESNGQPENNYKTTPPVLDSDGSFFL
VSKLTVDKSRWQQGNVFSCSVMHEALHNHYTQKSLSLSPGGGGSGGGSAPTSSSTKKTQLQL
EHLLLDLQMILNGINNYKNPKLTRMLTFKFYMPKKATELKHLQCLEEELKPLEEVLNLAQSK
NFHLRPRDLISNINVIVLELKGSETTFMCEYADETATIVEFLNRWITFSQSIISTLT
P-0482-Knob chain
(SEQ ID NO: 197)
DKTHTCPPCPAPEAAGAPSVFLFPPKPKDTLMISRTPEVTCVVVDVSHEDPEVKFNWYVDGV
EVHNAKTKPREEQYNSTYRVVSVLTVLHQDWLNGKEYKCKVSNKALPAPIEKTISKAKGQPR
EPQVCTLPPSREEMTKNQVSLWCLVKGFYPSDIAVEWESNGQPENNYKTTPPVLDSDGSFFL
YSKLTVDKSRWQQGNVFSCSVMHEALHNHYTQKSLSLSPGGGGGSGGGGSGGGGSELCDDDP
PEIPHATFKAMAYKEGTMLNCECKRGFRRIKSGSLYMLCTGNSSHSSWDNQCQCTSSATRNT
TKQVTPQPEEQKERKTTEMQSPMQPVDQASLPGHCREPPPWENEATERIYHFVVGQMVYYQC
VQGYRALHRGPAESVCKMTHGKTRWTQPQLICT
Benchmark-1
(SEQ ID NO: 198)
DKTHTCPPCPAPEAAGAPSVFLFPPKPKDTLMISRTPEVTCVVVDVSHEDPEVKFNWYVDGV
EVHNAKTKPREEQYNSTYRVVSVLTVLHQDWLNGKEYKCKVSNKALPAPIEKTISKAKGQPR
EPQVYTLPPSRDELTKNQVSLTCLVKGFYPSDIAVEWESNGQPENNYKTTPPVLDSDGSFFL
YSKLTVDKSRWQQGNVFSCSVMHEALHNHYTQKSLSLSPGGGGSGGGSAPTSSSTKKTQLQL
EHLLLDLQMILNGINNYKNPKLTRMLTFKFYMPKKATELKHLQCLEEELKPLEEVLNLAQSK
NFHLRPRDLISNINKIVLELKGSETTFMCEYADETATIVEFLNRWITFSQSIISTLT
Benchmark-3
(SEQ ID NO: 199)
DKTHTCPPCPAPEAAGAPSVFLFPPKPKDTLMISRTPEVTCVVVDVSHEDPEVKFNWYVDGV
EVHNAKTKPREEQYNSTYRVVSVLTVLHQDWLNGKEYKCKVSNKALPAPIEKTISKAKGQPR
EPQVYTLPPSRDELTKNQVSLTCLVKGFYPSDIAVEWESNGQPENNYKTTPPVLDSDGSFFL
YSKLTVDKSRWQQGNVFSCSVMHEALHNHYTQKSLSLSPGGGGSGGGSAPTSSSTKKTQLQL
EHLLLDLQMILNGINNYKNPKLTRMLTFKFYMPKKATELKHLQCLEEELKPLEEVLNLAQSK
NFHLRPRDLISDINVIVLELKGSETTFMCEYADETATIVEFLNRWITFSQSIISTLT
Vedolizumab-IL-2-variant-fusion-HC
(SEQ ID NO: 200)
QVQLVQSGAEVKKPGASVKVSCKGSGYTFTSYWMHWVRQAPGQRLEWIGEIDPSESNTNYNQ
KFKGRVTLTVDISASTAYMELSSLRSEDTAVYYCARGGYDGWDYAIDYWGQGTLVTVSSAST
KGPSVFPLAPSSKSTSGGTAALGCLVKDYFPEPVTVSWNSGALTSGVHTFPAVLQSSGLYSL
SSVVTVPSSSLGTQTYICNVNHKPSNTKVDKKVEPKSCDKTHTCPPCPAPELAGAPSVFLFP
PKPKDTLMISRTPEVTCVVVDVSHEDPEVKFNWYVDGVEVHNAKTKPREEQYNSTYRVVSVL
TVLHQDWLNGKEYKCKVSNKALPAPIEKTISKAKGQPREPQVYTLPPSRDELTKNQVSLTCL
VKGFYPSDIAVEWESNGQPENNYKTTPPVLDSDGSFFLYSKLTVDKSRWQQGNVFSCSVMHE
ALHNHYTQKSLSLSPGGGGSGGGSAPTSSSTKKTQLQLEHLLHDLQMILNGINNYKNPKLTR
MLTFKFYMPKKATELKHLQCLEEELKPLEEVLNLAQSKNFHLRPRDLISNINVIVLELKGSE
TTFMCEYADETATIVEFLNRWITFIESIISTLT
Vedolizumab-Lκ
(SEQ ID NO: 201)
DVVMTQSPLSLPVTPGEPASISCRSSQSLAKSYGNTYLSWYLQKPGQSPQLLIYGISNRFSG
VPDRFSGSGSGTDFTLKISRVEAEDVGVYYCLQGTHQPYTFGQGTKVEIKRTVAAPSVFIFP
PSDEQLKSGTASVVCLLNNFYPREAKVQWKVDNALQSGNSQESVTEQDSKDSTYSLSSTLTL
SKADYEKHKVYACEVTHQGLSSPVTKSFNRGEC
Humira-IL-2-variant-fusion-HC
(SEQ ID NO: 202)
EVQLVESGGGLVQPGRSLRLSCAASGFTFDDYAMHWVRQAPGKGLEWVSAITWNSGHIDYAD
SVEGRFTISRDNAKNSLYLQMNSLRAEDTAVYYCAKVSYLSTASSLDYWGQGTLVTVSSAST
KGPSVFPLAPSSKSTSGGTAALGCLVKDYFPEPVTVSWNSGALTSGVHTFPAVLQSSGLYSL
SSVVTVPSSSLGTQTYICNVNHKPSNTKVDKKVEPKSCDKTHTCPPCPAPELLGGPSVFLFP
PKPKDTLMISRTPEVTCVVVDVSHEDPEVKFNWYVDGVEVHNAKTKPREEQYNSTYRVVSVL
TVLHQDWLNGKEYKCKVSNKALPAPIEKTISKAKGQPREPQVYTLPPSRDELTKNQVSLTCL
VKGFYPSDIAVEWESNGQPENNYKTTPPVLDSDGSFFLYSKLTVDKSRWQQGNVFSCSVMHE
ALHNHYTQKSLSLSPGGGGSGGGSAPTSSSTKKTQLQLEHLLHDLQMILNGINNYKNPKLTR
MLTFKFYMPKKATELKHLQCLEEELKPLEEVLNLAQSKNFHLRPRDLISNINVIVLELKGSE
TTFMCEYADETATIVEFLNRWITFIESIISTLT
Humira-Lκ
(SEQ ID NO: 203)
DIQMTQSPSSLSASVGDRVTITCRASQGIRNYLAWYQQKPGKAPKLLIYAASTLQSGVPSRF
SGSGSGTDFTLTISSLQPEDVATYYCQRYNRAPYTFGQGTKVEIKRTVAAPSVFIFPPSDEQ
LKSGTASVVCLLNNFYPREAKVQWKVDNALQSGNSQESVTEQDSKDSTYSLSSTLTLSKADY
EKHKVYACEVTHQGLSSPVTKSFNRGEC
PF-00547659-IL-2-variant-HC
(SEQ ID NO: 204)
QVQLVQSGAEVKKPGASVKVSCKASGYTFTSYGINWVRQAPGQGLEWMGWISVYSGNTNYAQ
KVQGRVTMTADTSTSTAYMDLRSLRSDDTAVYYCAREGSSSSGDYYYGMDVWGQGTTVTVSS
ASTKGPSVFPLAPCSRSTSESTAALGCLVKDYFPEPVTVSWNSGALTSGVHTFPAVLQSSGL
YSLSSVVTVPSSNFGTQTYTCNVDHKPSNTKVDKTVERKCCVECPPCPAPPVAGPSVFLFPP
KPKDTLMISRTPEVTCVVVDVSHEDPEVQFNWYVDGVEVHNAKTKPREEQFNSTFRVVSVLT
VVHQDWLNGKEYKCKVSNKGLPAPIEKTISKTKGQPREPQVYTLPPSREEMTKNQVSLTCLV
KGFYPSDIAVEWESNGQPENNYKTTPPMLDSDGSFFLYSKLTVDKSRWQQGNVFSCSVMHEA
LHNHYTQKSLSLSPGGGGSGGGSAPTSSSTKKTQLQLEHLLYDLQMILNGINNYKNPKLTRM
LTFKFYMPKKATELKHLQCLEEELKPLEEVLNLAQSKNFHLRPRDLISNINVIVLELKGSET
TFMCEYADETATIVEFLNRWITFIESIISTLT
PF-00547659-Lκ
(SEQ ID NO: 205)
DIVMTQTPLSLSVTPGQPASISCKSSQSLLHTDGTTYLYWYLQKPGQPPQLLIYEVSNRFSG
VPDRFSGSGSGTDFTLKISRVEAEDVGIYYCMQNIQLPWTFGQGTKVEIKRTVAAPSVFIFP
PSDEQLKSGTASVVCLLNNFYPREAKVQWKVDNALQSGNSQESVTEQDSKDSTYSLSSTLTL
SKADYEKHKVYACEVTHQGLSSPVTKSFNRGEC
Etrolizumab-IL-2-variant-HC
(SEQ ID NO: 206)
EVQLVESGGGLVQPGGSLRLSCSVTGFFITNNYWGWVRQAPGKGLEWVGYISYSGSTSYNPS
LKSRFTISRDNSKNTFYLQMNSLRAEDTAVYYCAMTGSSGYFDFWGQGTLVTVSSASTKGPS
VFPLAPSSKSTSGGTAALGCLVKDYFPEPVTVSWNSGALTSGVHTFPAVLQSSGLYSLSSVV
TVPSSSLGTQTYICNVNHKPSNTKVDKKVEPKSCDKTHTCPPCPAPELLGGPSVFLFPPKPK
DTLMISRTPEVTCVVVDVSHEDPEVKFNWYVDGVEVHNAKTKPREEQYNSTYRVVSVLTVLH
QDWLNGKEYKCKVSNKALPAPIEKTISKAKGQPREPQVYTLPPSRDELTKNQVSLTCLVKGF
YPSDIAVEWESNGQPENNYKTTPPVLDSDGSFFLYSKLTVDKSRWQQGNVFSCSVMHEALHN
HYTQKSLSLSPGGGGSGGGSAPTSSSTKKTQLQLEHLLYDLQMILNGINNYKNPKLTRMLTF
KFYMPKKATELKHLQCLEEELKPLEEVLNLAQSKNFHLRPRDLISNINVIVLELKGSETTFM
CEYADETATIVEFLNRWITFIESIISTLT
Etrolizumab-Lκ
(SEQ ID NO: 207)
DIQMTQSPSSLSASVGDRVTITCRASESVDDLLHWYQQKPGKAPKLLIKYASQSISGVPSRF
SGSGSGTDFTLTISSLQPEDFATYYCQQGNSLPNTFGQGTKVEIKRTVAAPSVFIFPPSDEQ
LKSGTASVVCLLNNFYPREAKVQWKVDNALQSGNSQESVTEQDSKDSTYSLSSTLTLSKADY
EKHKVYACEVTHQGLSSPVTKSFNRGEC
IL-2 L19H/S125I/Q126E variant sequence
(SEQ ID NO: 208)
APTSSSTKKTQLQLEHLLHDLQMILNGINNYKNPKLTRMLTFKFYMPKKATELKHLQCLEEE
LKPLEEVLNLAQSKNFHLRPRDLISNINVIVLELKGSETTFMCEYADETATIVEFLNRWITF
IESIISTLT
IL-2 L19H/S125I/Q126K variant sequence
(SEQ ID NO: 209)
APTSSSTKKTQLQLEHLLHDLQMILNGINNYKNPKLTRMLTFKFYMPKKATELKHLQCLEEE
LKPLEEVLNLAQSKNFHLRPRDLISNINVIVLELKGSETTFMCEYADETATIVEFLNRWITF
IKSIISTLT
IL-2 L19Q/Q126K variant sequence
(SEQ ID NO: 210)
APTSSSTKKTQLQLEHLLQDLQMILNGINNYKNPKLTRMLTFKFYMPKKATELKHLQCLEEE
LKPLEEVLNLAQSKNFHLRPRDLISNINVIVLELKGSETTFMCEYADETATIVEFLNRWITF
SKSIISTLT
IL-2 L19Q/S125I/Q126E variant sequence
(SEQ ID NO: 211)
APTSSSTKKTQLQLEHLLQDLQMILNGINNYKNPKLTRMLTFKFYMPKKATELKHLQCLEEE
LKPLEEVLNLAQSKNFHLRPRDLISNINVIVLELKGSETTFMCEYADETATIVEFLNRWITF
IESIISTLT
IL-2 L19Q/S125I/Q126K variant sequence
(SEQ ID NO: 212)
APTSSSTKKTQLQLEHLLQDLQMILNGINNYKNPKLTRMLTFKFYMPKKATELKHLQCLEEE
LKPLEEVLNLAQSKNFHLRPRDLISNINVIVLELKGSETTFMCEYADETATIVEFLNRWITF
IKSIISTLT
P-0511
(SEQ ID NO: 213)
DKTHTCPPCPAPEAAGAPSVFLFPPKPKDTLMISRTPEVTCVVVDVSHEDPEVKFNWYVDGV
EVHNAKTKPREEQYNSTYRVVSVLTVLHQDWLNGKEYKCKVSNKALPAPIEKTISKAKGQPR
EPQVYTLPPSRDELTKNQVSLTCLVKGFYPSDIAVEWESNGQPENNYKTTPPVLDSDGSFFL
YSKLTVDKSRWQQGNVFSCSVMHEALHNHYTQKSLSLSPGGGGSGGGSAPTSSSTKKTQLQL
EHLLHDLQMILNGINNYKNPKLTRMLTFKFYMPKKATELKHLQCLEEELKPLEEVLNLAQSK
NFHLRPRDLISNINVIVLELKGSETTFMCEYADETATIVEFLNRWITFIESIISTLT
P-0512
(SEQ ID NO: 214)
DKTHTCPPCPAPEAAGAPSVFLFPPKPKDTLMISRTPEVTCVVVDVSHEDPEVKFNWYVDGV
EVHNAKTKPREEQYNSTYRVVSVLTVLHQDWLNGKEYKCKVSNKALPAPIEKTISKAKGQPR
EPQVYTLPPSRDELTKNQVSLTCLVKGFYPSDIAVEWESNGQPENNYKTTPPVLDSDGSFFL
YSKLTVDKSRWQQGNVFSCSVMHEALHNHYTQKSLSLSPGGGGSGGGSAPTSSSIKKTQLQL
EHLLHDLQMILNGINNYKNPKLTRMLTFKFYMPKKATELKHLQCLEEELKPLEEVLNLAQSK
NFHLRPRDLISNINVIVLELKGSETTFMCEYADETATIVEFLNRWITFIKSIISTLT
P-0513
(SEQ ID NO: 215)
DKTHTCPPCPAPEAAGAPSVFLFPPKPKDTLMISRTPEVTCVVVDVSHEDPEVKFNWYVDGV
EVHNAKTKPREEQYNSTYRVVSVLTVLHQDWLNGKEYKCKVSNKALPAPIEKTISKAKGQPR
EPQVYTLPPSRDELTKNQVSLTCLVKGFYPSDIAVEWESNGQPENNYKTTPPVLDSDGSFFL
YSKLTVDKSRWQQGNVFSCSVMHEALHNHYTQKSLSLSPGGGGSGGGSAPTSSSIKKTQLQL
EHLLQDLQMILNGINNYKNPKLTRMLTFKFYMPKKATELKHLQCLEEELKPLEEVLNLAQSK
NFHLRPRDLISNINVIVLELKGSETTFMCEYADETATIVEFLNRWITFSKSIISTLT
P-0514
(SEQ ID NO: 216)
DKTHTCPPCPAPEAAGAPSVFLFPPKPKDTLMISRTPEVTCVVVDVSHEDPEVKFNWYVDGV
EVHNAKTKPREEQYNSTYRVVSVLTVLHQDWLNGKEYKCKVSNKALPAPIEKTISKAKGQPR
EPQVYTLPPSRDELTKNQVSLTCLVKGFYPSDIAVEWESNGQPENNYKTTPPVLDSDGSFFL
YSKLTVDKSRWQQGNVFSCSVMHEALHNHYTQKSLSLSPGGGGSGGGSAPTSSSIKKTQLQL
EHLLQDLQMILNGINNYKNPKLTRMLTFKFYMPKKATELKHLQCLEEELKPLEEVLNLAQSK
NFHLRPRDLISNINVIVLELKGSETTFMCEYADETATIVEFLNRWITFIESIISTLT
P-0515
(SEQ ID NO: 217)
DKTHTCPPCPAPEAAGAPSVFLFPPKPKDTLMISRTPEVTCVVVDVSHEDPEVKFNWYVDGV
EVHNAKTKPREEQYNSTYRVVSVLTVLHQDWLNGKEYKCKVSNKALPAPIEKTISKAKGQPR
EPQVYTLPPSRDELTKNQVSLTCLVKGFYPSDIAVEWESNGQPENNYKTTPPVLDSDGSFFL
YSKLTVDKSRWQQGNVFSCSVMHEALHNHYTQKSLSLSPGGGGSGGGSAPTSSSIKKTQLQL
EHLLQDLQMILNGINNYKNPKLTRMLTFKFYMPKKATELKHLQCLEEELKPLEEVLNLAQSK
NFHLRPRDLISNINVIVLELKGSETTFMCEYADETATIVEFLNRWITFIKSIISTLT
P-0585
(SEQ ID NO: 218)
DKTHTCPPCPAPEAAGGPSVFLFPPKPKDTLYITREPEVTCVVVDVSHEDPEVKFNWYVDGV
EVHNAKTKPREEQYNSTYRVVSVLTVLHQDWLNGKEYKCKVSNKALPAPIEKTISKAKGQPR
EPQVYTLPPSREEMTKNQVSLTCLVKGFYPSDIAVEWESNGQPENNYKTTPPVLDSDGSFFL
YSKLTVDKSRWQQGNVFSCSVMHEALHNHYTQKSLSLSPGGGGSGGGSAPTSSSIKKTQLQL
EHLLHDLQMILNGINNYKNPKLTRMLTFKFYMPKKATELKHLQCLEEELKPLEEVLNLAQSK
NFHLRPRDLISNINVIVLELKGSETTFMCEYADETATIVEFLNRWITFIESIISTLT
P-0616
(SEQ ID NO: 219)
DKTHTCPPCPAPEAAGAPSVFLFPPKPKDTLMISRTPEVTCVVVDVSHEDPEVKFNWYVDGV
EVHNAKTKPREEQYNSTYRVVSVLTVLHQDWLNGKEYKCKVSNKALPAPIEKTISKAKGQPR
EPQVYTLPPSRDELTKNQVSLTCLVKGFYPSDIAVEWESNGQPENNYKTTPPVLDSDGSFFL
YSKLTVDKSRWQQGNVFSCSVMHEALHAHYTQKSLSLSPGGGGSGGGSAPTSSSIKKTQLQL
EHLLHDLQMILNGINNYKNPKLTRMLTFKFYMPKKATELKHLQCLEEELKPLEEVLNLAQSK
NFHLRPRDLISNINVIVLELKGSETTFMCEYADETATIVEFLNRWITFIESIISTLT
IL-2 R38E/F42A/S125I variant sequence
(SEQ ID NO: 220)
APTSSSTKKTQLQLEHLLLDLQMILNGINNYKNPKLTEMLTAKFYMPKKATELKHLQCLEEE
LKPLEEVLNLAQSKNFHLRPRDLISNINVIVLELKGSETTFMCEYADETATIVEFLNRWITF
IQSIISTLT
IL-2 R38A/S125I variant sequence
(SEQ ID NO: 221)
APTSSSTKKTQLQLEHLLLDLQMILNGINNYKNPKLTAMLTFKFYMPKKATELKHLQCLEEE
LKPLEEVLNLAQSKNFHLRPRDLISNINVIVLELKGSETTFMCEYADETATIVEFLNRWITF
IQSIISTLT
IL-2 T41A/S125I variant sequence
(SEQ ID NO: 222)
APTSSSTKKTQLQLEHLLLDLQMILNGINNYKNPKLTRMLAFKFYMPKKATELKHLQCLEEE
LKPLEEVLNLAQSKNFHLRPRDLISNINVIVLELKGSETTFMCEYADETATIVEFLNRWITF
IQSIISTLT
IL-2 T41G/S125I variant sequence
(SEQ ID NO: 223)
APTSSSTKKTQLQLEHLLLDLQMILNGINNYKNPKLTRMLGFKFYMPKKATELKHLQCLEEE
LKPLEEVLNLAQSKNFHLRPRDLISNINVIVLELKGSETTFMCEYADETATIVEFLNRWITF
IQSIISTLT
IL-2 T41V/S125I variant sequence
(SEQ ID NO: 224)
APTSSSTKKTQLQLEHLLLDLQMILNGINNYKNPKLTRMLVFKFYMPKKATELKHLQCLEEE
LKPLEEVLNLAQSKNFHLRPRDLISNINVIVLELKGSETTFMCEYADETATIVEFLNRWITF
IQSIISTLT
IL-2 F44G/S125I variant sequence
(SEQ ID NO: 225)
APTSSSTKKTQLQLEHLLLDLQMILNGINNYKNPKLTRMLTFKGYMPKKATELKHLQCLEEE
LKPLEEVLNLAQSKNFHLRPRDLISNINVIVLELKGSETTFMCEYADETATIVEFLNRWITF
IQSIISTLT
IL-2 F44V/S125I variant sequence
(SEQ ID NO: 226)
APTSSSTKKTQLQLEHLLLDLQMILNGINNYKNPKLTRMLTFKVYMPKKATELKHLQCLEEE
LKPLEEVLNLAQSKNFHLRPRDLISNINVIVLELKGSETTFMCEYADETATIVEFLNRWITF
IQSIISTLT
IL-2 P65G/S125I variant sequence
(SEQ ID NO: 227)
APTSSSTKKTQLQLEHLLLDLQMILNGINNYKNPKLTRMLTFKFYMPKKATELKHLQCLEEE
LKGLEEVLNLAQSKNFHLRPRDLISNINVIVLELKGSETTFMCEYADETATIVEFLNRWITF
IQSIISTLT
IL-2 Y107G/S125I variant sequence
(SEQ ID NO: 228)
APTSSSTKKTQLQLEHLLLDLQMILNGINNYKNPKLTRMLTFKVYMPKKATELKHLQCLEEE
LKPLEEVLNLAQSKNFHLRPRDLISNINVIVLELKGSETTFMCEGADETATIVEFLNRWITF
IQSIISTLT
IL-2 Y107H/S125I variant sequence
(SEQ ID NO: 229)
APTSSSTKKTQLQLEHLLLDLQMILNGINNYKNPKLTRMLTFKVYMPKKATELKHLQCLEEE
LKPLEEVLNLAQSKNFHLRPRDLISNINVIVLELKGSETTFMCEHADETATIVEFLNRWITF
IQSIISTLT
IL-2 Y107L/S125I variant sequence
(SEQ ID NO: 230)
APTSSSTKKTQLQLEHLLLDLQMILNGINNYKNPKLTRMLTFKVYMPKKATELKHLQCLEEE
LKPLEEVLNLAQSKNFHLRPRDLISNINVIVLELKGSETTFMCELADETATIVEFLNRWITF
IQSIISTLT
IL-2 Y107V/S125I variant sequence
(SEQ ID NO: 231)
APTSSSTKKTQLQLEHLLLDLQMILNGINNYKNPKLTRMLTFKVYMPKKATELKHLQCLEEE
LKPLEEVLNLAQSKNFHLRPRDLISNINVIVLELKGSETTFMCEVADETATIVEFLNRWITF
IQSIISTLT
IL-2 R38A/P65G/S125I variant sequence
(SEQ ID NO: 232)
APTSSSTKKTQLQLEHLLLDLQMILNGINNYKNPKLTAMLTFKFYMPKKATELKHLQCLEEE
LKGLEEVLNLAQSKNFHLRPRDLISNINVIVLELKGSETTFMCEYADETATIVEFLNRWITF
IQSIISTLT
IL-2 F42A/S125I variant sequence
(SEQ ID NO: 233)
APTSSSTKKTQLQLEHLLLDLQMILNGINNYKNPKLTRMLTAKFYMPKKATELKHLQCLEEE
LKPLEEVLNLAQSKNFHLRPRDLISNINVIVLELKGSETTFMCEYADETATIVEFLNRWITF
IQSIISTLT
IL-2 R38E/S125I variant sequence
(SEQ ID NO: 234)
APTSSSTKKTQLQLEHLLLDLQMILNGINNYKNPKLTEMLTFKFYMPKKATELKHLQCLEEE
LKPLEEVLNLAQSKNFHLRPRDLISNINVIVLELKGSETTFMCEYADETATIVEFLNRWITF
IQSIISTLT
P-0615
(SEQ ID NO: 235)
DKTHTCPPCPAPEAAGAPSVFLFPPKPKDTLMISRTPEVTCVVVDVSHEDPEVKFNWYVDGV
EVHNAKTKPREEQYNSTYRVVSVLTVLHQDWLNGKEYKCKVSNKALPAPIEKTISKAKGQPR
EPQVYTLPPSRDELTKNQVSLTCLVKGFYPSDIAVEWESNGQPENNYKTTPPVLDSDGSFFL
YSKLTVDKSRWQQGNVFSCSVMHEALHNHYTQKSLSLSPGGGGSGGGSAPTSSSTKKTQLQL
EHLLLDLQMILNGINNYKNPKLTEMLTAKFYMPKKATELKHLQCLEEELKPLEEVLNLAQSK
NFHLRPRDLISNINVIVLELKGSETTFMCEYADETATIVEFLNRWITFIQSIISTLT
P-0602
(SEQ ID NO: 236)
DKTHTCPPCPAPEAAGAPSVFLFPPKPKDTLMISRTPEVTCVVVDVSHEDPEVKFNWYVDGV
EVHNAKTKPREEQYNSTYRVVSVLTVLHQDWLNGKEYKCKVSNKALPAPIEKTISKAKGQPR
EPQVYTLPPSRDELTKNQVSLTCLVKGFYPSDIAVEWESNGQPENNYKTTPPVLDSDGSFFL
YSKLTVDKSRWQQGNVFSCSVMHEALHNHYTQKSLSLSPGGGGSGGGSAPTSSSIKKTQLQL
EHLLLDLQMILNGINNYKNPKLTAMLTFKFYMPKKATELKHLQCLEEELKPLEEVLNLAQSK
NFHLRPRDLISNINVIVLELKGSETTFMCEYADETATIVEFLNRWITFIQSIISTLT
P-0603
(SEQ ID NO: 237)
DKTHTCPPCPAPEAAGAPSVFLFPPKPKDTLMISRTPEVTCVVVDVSHEDPEVKFNWYVDGV
EVHNAKTKPREEQYNSTYRVVSVLTVLHQDWLNGKEYKCKVSNKALPAPIEKTISKAKGQPR
EPQVYTLPPSRDELTKNQVSLTCLVKGFYPSDIAVEWESNGQPENNYKTTPPVLDSDGSFFL
YSKLTVDKSRWQQGNVFSCSVMHEALHNHYTQKSLSLSPGGGGSGGGSAPTSSSIKKTQLQL
EHLLLDLQMILNGINNYKNPKLTRMLAFKFYMPKKATELKHLQCLEEELKPLEEVLNLAQSK
NFHLRPRDLISNINVIVLELKGSETTFMCEYADETATIVEFLNRWITFIQSIISTLT
P-0604
(SEQ ID NO: 238)
DKTHTCPPCPAPEAAGAPSVFLFPPKPKDTLMISRTPEVTCVVVDVSHEDPEVKFNWYVDGV
EVHNAKTKPREEQYNSTYRVVSVLTVLHQDWLNGKEYKCKVSNKALPAPIEKTISKAKGQPR
EPQVYTLPPSRDELTKNQVSLTCLVKGFYPSDIAVEWESNGQPENNYKTTPPVLDSDGSFFL
YSKLTVDKSRWQQGNVFSCSVMHEALHNHYTQKSLSLSPGGGGSGGGSAPTSSSIKKTQLQL
EHLLLDLQMILNGINNYKNPKLTRMLGFKFYMPKKATELKHLQCLEEELKPLEEVLNLAQSK
NFHLRPRDLISNINVIVLELKGSETTFMCEYADETATIVEFLNRWITFIQSIISTLT
P-0605
(SEQ ID NO: 239)
DKTHTCPPCPAPEAAGAPSVFLFPPKPKDTLMISRTPEVTCVVVDVSHEDPEVKFNWYVDGV
EVHNAKTKPREEQYNSTYRVVSVLTVLHQDWLNGKEYKCKVSNKALPAPIEKTISKAKGQPR
EPQVYTLPPSRDELTKNQVSLTCLVKGFYPSDIAVEWESNGQPENNYKTTPPVLDSDGSFFL
YSKLTVDKSRWQQGNVFSCSVMHEALHNHYTQKSLSLSPGGGGSGGGSAPTSSSIKKTQLQL
EHLLLDLQMILNGINNYKNPKLTRMLVFKFYMPKKATELKHLQCLEEELKPLEEVLNLAQSK
NFHLRPRDLISNINVIVLELKGSETTFMCEYADETATIVEFLNRWITFIQSIISTLT
P-0606
(SEQ ID NO: 240)
DKTHTCPPCPAPEAAGAPSVFLFPPKPKDTLMISRTPEVTCVVVDVSHEDPEVKFNWYVDGV
EVHNAKTKPREEQYNSTYRVVSVLTVLHQDWLNGKEYKCKVSNKALPAPIEKTISKAKGQPR
EPQVYTLPPSRDELTKNQVSLTCLVKGFYPSDIAVEWESNGQPENNYKTTPPVLDSDGSFFL
YSKLTVDKSRWQQGNVFSCSVMHEALHNHYTQKSLSLSPGGGGSGGGSAPTSSSIKKTQLQL
EHLLLDLQMILNGINNYKNPKLTRMLTFKGYMPKKATELKHLQCLEEELKPLEEVLNLAQSK
NFHLRPRDLISNINVIVLELKGSETTFMCEYADETATIVEFLNRWITFIQSIISTLT
P-0607
(SEQ ID NO: 241)
DKTHTCPPCPAPEAAGAPSVFLFPPKPKDTLMISRTPEVTCVVVDVSHEDPEVKFNWYVDGV
EVHNAKTKPREEQYNSTYRVVSVLTVLHQDWLNGKEYKCKVSNKALPAPIEKTISKAKGQPR
EPQVYTLPPSRDELTKNQVSLTCLVKGFYPSDIAVEWESNGQPENNYKTTPPVLDSDGSFFL
YSKLTVDKSRWQQGNVFSCSVMHEALHNHYTQKSLSLSPGGGGSGGGSAPTSSSIKKTQLQL
EHLLLDLQMILNGINNYKNPKLTRMLTFKVYMPKKATELKHLQCLEEELKPLEEVLNLAQSK
NFHLRPRDLISNINVIVLELKGSETTFMCEYADETATIVEFLNRWITFIQSIISTLT
P-0608
(SEQ ID NO: 242)
DKTHTCPPCPAPEAAGAPSVFLFPPKPKDTLMISRTPEVTCVVVDVSHEDPEVKFNWYVDGV
EVHNAKTKPREEQYNSTYRVVSVLTVLHQDWLNGKEYKCKVSNKALPAPIEKTISKAKGQPR
EPQVYTLPPSRDELTKNQVSLTCLVKGFYPSDIAVEWESNGQPENNYKTTPPVLDSDGSFFL
YSKLTVDKSRWQQGNVFSCSVMHEALHNHYTQKSLSLSPGGGGSGGGSAPTSSSIKKTQLQL
EHLLLDLQMILNGINNYKNPKLTRMLTFKFYMPKKATELKHLQCLEEELKGLEEVLNLAQSK
NFHLRPRDLISNINVIVLELKGSETTFMCEYADETATIVEFLNRWITFIQSIISTLT
P-0609
(SEQ ID NO: 243)
DKTHTCPPCPAPEAAGAPSVFLFPPKPKDTLMISRTPEVTCVVVDVSHEDPEVKFNWYVDGV
EVHNAKTKPREEQYNSTYRVVSVLTVLHQDWLNGKEYKCKVSNKALPAPIEKTISKAKGQPR
EPQVYTLPPSRDELTKNQVSLTCLVKGFYPSDIAVEWESNGQPENNYKTTPPVLDSDGSFFL
YSKLTVDKSRWQQGNVFSCSVMHEALHNHYTQKSLSLSPGGGGSGGGSAPTSSSIKKTQLQL
EHLLLDLQMILNGINNYKNPKLTRMLTFKFYMPKKATELKHLQCLEEELKPLEEVLNLAQSK
NFHLRPRDLISNINVIVLELKGSETTFMCEGADETATIVEFLNRWITFIQSIISTLT
P-0610
(SEQ ID NO: 244)
DKTHTCPPCPAPEAAGAPSVFLFPPKPKDTLMISRTPEVTCVVVDVSHEDPEVKFNWYVDGV
EVHNAKTKPREEQYNSTYRVVSVLTVLHQDWLNGKEYKCKVSNKALPAPIEKTISKAKGQPR
EPQVYTLPPSRDELTKNQVSLTCLVKGFYPSDIAVEWESNGQPENNYKTTPPVLDSDGSFFL
YSKLTVDKSRWQQGNVFSCSVMHEALHNHYTQKSLSLSPGGGGSGGGSAPTSSSIKKTQLQL
EHLLLDLQMILNGINNYKNPKLTRMLTFKFYMPKKATELKHLQCLEEELKPLEEVLNLAQSK
NFHLRPRDLISNINVIVLELKGSETTFMCEHADETATIVEFLNRWITFIQSIISTLT
P-0611
(SEQ ID NO: 245)
DKTHTCPPCPAPEAAGAPSVFLFPPKPKDTLMISRTPEVTCVVVDVSHEDPEVKFNWYVDGV
EVHNAKTKPREEQYNSTYRVVSVLTVLHQDWLNGKEYKCKVSNKALPAPIEKTISKAKGQPR
EPQVYTLPPSRDELTKNQVSLTCLVKGFYPSDIAVEWESNGQPENNYKTTPPVLDSDGSFFL
YSKLTVDKSRWQQGNVFSCSVMHEALHNHYTQKSLSLSPGGGGSGGGSAPTSSSIKKTQLQL
EHLLLDLQMILNGINNYKNPKLTRMLTFKFYMPKKATELKHLQCLEEELKPLEEVLNLAQSK
NFHLRPRDLISNINVIVLELKGSETTFMCELADETATIVEFLNRWITFIQSIISTLT
P-0612
(SEQ ID NO: 246)
DKTHTCPPCPAPEAAGAPSVFLFPPKPKDTLMISRTPEVTCVVVDVSHEDPEVKFNWYVDGV
EVHNAKTKPREEQYNSTYRVVSVLTVLHQDWLNGKEYKCKVSNKALPAPIEKTISKAKGQPR
EPQVYTLPPSRDELTKNQVSLTCLVKGFYPSDIAVEWESNGQPENNYKTTPPVLDSDGSFFL
YSKLTVDKSRWQQGNVFSCSVMHEALHNHYTQKSLSLSPGGGGSGGGSAPTSSSIKKTQLQL
EHLLLDLQMILNGINNYKNPKLTRMLTFKFYMPKKATELKHLQCLEEELKPLEEVLNLAQSK
NFHLRPRDLISNINVIVLELKGSETTFMCEVADETATIVEFLNRWITFIQSIISTLT
P-0573
(SEQ ID NO: 247)
DKTHTCPPCPAPEAAGAPSVFLFPPKPKDTLMISRTPEVTCVVVDVSHEDPEVKFNWYVDGV
EVHNAKTKPREEQYNSTYRVVSVLTVLHQDWLNGKEYKCKVSNKALPAPIEKTISKAKGQPR
EPQVYTLPPSRDELTKNQVSLTCLVKGFYPSDIAVEWESNGQPENNYKTTPPVLDSDGSFFL
YSKLTVDKSRWQQGNVFSCSVMHEALHNHYTQKSLSLSPGGGGSGGGSAPTSSSIKKTQLQL
EHLLLDLQMILNGINNYKNPKLTAMLTFKFYMPKKATELKHLQCLEEELKGLEEVLNLAQSK
NFHLRPRDLISNINVIVLELKGSETTFMCEYADETATIVEFLNRWITFIQSIISTLT
P-0613
(SEQ ID NO: 248)
DKTHTCPPCPAPEAAGAPSVFLFPPKPKDTLMISRTPEVTCVVVDVSHEDPEVKFNWYVDGV
EVHNAKTKPREEQYNSTYRVVSVLTVLHQDWLNGKEYKCKVSNKALPAPIEKTISKAKGQPR
EPQVYTLPPSRDELTKNQVSLTCLVKGFYPSDIAVEWESNGQPENNYKTTPPVLDSDGSFFL
YSKLTVDKSRWQQGNVFSCSVMHEALHNHYTQKSLSLSPGGGGSGGGSAPTSSSTKKTQLQL
EHLLLDLQMILNGINNYKNPKLTRMLTAKFYMPKKATELKHLQCLEEELKPLEEVLNLAQSK
NFHLRPRDLISNINVIVLELKGSETTFMCEYADETATIVEFLNRWITFIQSIISTLT
P-0614
(SEQ ID NO: 249)
DKTHTCPPCPAPEAAGAPSVFLFPPKPKDTLMISRTPEVTCVVVDVSHEDPEVKFNWYVDGV
EVHNAKTKPREEQYNSTYRVVSVLTVLHQDWLNGKEYKCKVSNKALPAPIEKTISKAKGQPR
EPQVYTLPPSRDELTKNQVSLTCLVKGFYPSDIAVEWESNGQPENNYKTTPPVLDSDGSFFL
YSKLTVDKSRWQQGNVFSCSVMHEALHNHYTQKSLSLSPGGGGSGGGSAPTSSSTKKTQLQL
EHLLLDLQMILNGINNYKNPKLTEMLTFKFYMPKKATELKHLQCLEEELKPLEEVLNLAQSK
NFHLRPRDLISNINVIVLELKGSETTFMCEYADETATIVEFLNRWITFIQSIISTLT
Benchmark-4
(SEQ ID NO: 250)
DKTHTCPPCPAPEAAGAPSVFLFPPKPKDTLMISRTPEVTCVVVDVSHEDPEVKFNWYVDGV
EVHNAKTKPREEQYNSTYRVVSVLTVLHQDWLNGKEYKCKVSNKALPAPIEKTISKAKGQPR
EPQVYTLPPSRDELTKNQVSLTCLVKGFYPSDIAVEWESNGQPENNYKTTPPVLDSDGSFFL
YSKLTVDKSRWQQGNVFSCSVMHEALHNHYTQKSLSLSPGGGGSGGGSAPTSSSTKKTQLQL
EHLLLDLQMILNGINNYKNPKLTRMLTAKFAMPKKATELKHLQCLEEELKPLEEVLNGAQSK
NFHLRPRDLISNINVIVLELKGSETTFMCEYADETATIVEFLNRWITFIQSIISTLT
Human IgG1-Fc with reduced/abolished effector function and extended half-lifer
(SEQ ID NO: 251)
DKTHTCPPCPAPEAAGGPSVFLFPPKPKDTLYITREPEVTCVVVDVSHEDPEVKFNWYVDGV
EVHNAKTKPREEQYNSTYRVVSVLTVLHQDWLNGKEYKCKVSNKALPAPIEKTISKAKGQPR
EPQVYTLPPSRDELTKNQVSLTCLVKGFYPSDIAVEWESNGQPENNYKTTPPVLDSDGSFFL
YSKLTVDKSRWQQGNVFSCSVMHEALHNHYTQKSLSLSPG
Human IgG1-Fc with reduced/abolished effector function and extended half-lifer
(SEQ ID NO: 252)
DKTHTCPPCPAPEAAGAPSVFLFPPKPKDTLMISRTPEVTCVVVDVSHEDPEVKFNWYVDGV
EVHNAKTKPREEQYNSTYRVVSVLTVLHQDWLNGKEYKCKVSNKALPAPIEKTISKAKGQPR
EPQVYTLPPSRDELTKNQVSLTCLVKGFYPSDIAVEWESNGQPENNYKTTPPVLDSDGSFFL
YSKLTVDKSRWQQGNVFSCSVMHEALHAHYTQKSLSLSPG
Tocilizumab-Lκ
(SEQ ID NO: 253)
DIQMTQSPSSLSASVGDRVTITCRASQDISSYLNWYQQKPGKAPKLLIYYTSRLHSGVPSRF
SGSGSGTDFTFTISSLQPEDIATYYCQQGNTLPYTFGQGTKVEIKRTVAAPSVFIFPPSDEQ
LKSGTASVVCLLNNFYPREAKVQWKVDNALQSGNSQESVTEQDSKDSTYSLSSTLTLSKADY
EKHKVYACEVTHQGLSSPVTKSFNRGEC
Tocilizumab-Hole-HC
(SEQ ID NO: 254)
QVQLQESGPGLVRPSQTLSLICTVSGYSITSDHAWSWVRQPPGRGLEWIGYISYSGITTYNP
SLKSRVTMLRDTSKNQFSLRLSSVTAADTAVYYCARSLARTTAMDYWGQGSLVTVSSASTKG
PSVFPLAPSSKSTSGGTAALGCLVKDYFPEPVTVSWNSGALTSGVHTFPAVLQSSGLYSLSS
VVTVPSSSLGTQTYICNVNHKPSNTKVDKKVEPKSCDKTHTCPPCPAPEAAGAPSVFLFPPK
PKDTLMISRTPEVTCVVVDVSHEDPEVKFNWYVDGVEVHNAKTKPREEQYNSTYRVVSVLTV
LHQDWLNGKEYKCKVSNKALPAPIEKTISKAKGQPREPQVYTLPPCRDELTKNQVSLSCAVK
GFYPSDIAVEWESNGQPENNYKTTPPVLDSDGSFFLVSKLTVDKSRWQQGNVFSCSVMHEAL
HNHYTQKSLSLSPG
Tociluzimab-IL-2-variant-fusion-HC-1
(SEQ ID NO: 255)
QVQLQESGPGLVRPSQTLSLICTVSGYSITSDHAWSWVRQPPGRGLEWIGYISYSGITTYNP
SLKSRVTMLRDTSKNQFSLRLSSVTAADTAVYYCARSLARTTAMDYWGQGSLVTVSSASTKG
PSVFPLAPSSKSTSGGTAALGCLVKDYFPEPVTVSWNSGALTSGVHTFPAVLQSSGLYSLSS
VVTVPSSSLGTQTYICNVNHKPSNTKVDKKVEPKSCDKTHTCPPCPAPEAAGAPSVFLFPPK
PKDTLMISRTPEVTCVVVDVSHEDPEVKFNWYVDGVEVHNAKTKPREEQYNSTYRVVSVLTV
LHQDWLNGKEYKCKVSNKALPAPIEKTISKAKGQPREPQVYTLPPSRDELTKNQVSLTCLVK
GFYPSDIAVEWESNGQPENNYKTIPPVLDSDGSFFLYSKLTVDKSRWQQGNVFSCSVMHEAL
HNHYTQKSLSLSPGGGGSGGGSAPTSSSTKKTQLQLEHLLHDLQMILNGINNYKNPKLTRML
TFKFYMPKKATELKHLQCLEEELKPLEEVLNLAQSKNFHLRPRDLISNINVIVLELKGSETT
FMCEYADETATIVEFLNRWITFIESIISTLT
Tociluzimab-IL-2-variant-fusion-Knob-HC-1
(SEQ ID NO: 256)
QVQLQESGPGLVRPSQTLSLICTVSGYSITSDHAWSWVRQPPGRGLEWIGYISYSGITTYNP
SLKSRVTMLRDTSKNQFSLRLSSVTAADTAVYYCARSLARTTAMDYWGQGSLVTVSSASTKG
PSVFPLAPSSKSTSGGTAALGCLVKDYFPEPVTVSWNSGALTSGVHTFPAVLQSSGLYSLSS
VVTVPSSSLGTQTYICNVNHKPSNTKVDKKVEPKSCDKTHTCPPCPAPEAAGAPSVFLFPPK
PKDTLMISRTPEVTCVVVDVSHEDPEVKFNWYVDGVEVHNAKTKPREEQYNSTYRVVSVLTV
LHQDWLNGKEYKCKVSNKALPAPIEKTISKAKGQPREPQVCTLPPSRDELTKNQVSLWCLVK
GFYPSDIAVEWESNGQPENNYKTTPPVLDSDGSFFLYSKLTVDKSRWQQGNVFSCSVMHEAL
HNHYTQKSLSLSPGGGGSGGGSAPTSSSTKKTQLQLEHLLHDLQMILNGINNYKNPKLTRML
TFKFYMPKKATELKHLQCLEEELKPLEEVLNLAQSKNFHLRPRDLISNINVIVLELKGSETT
FMCEYADETATIVEFLNRWITFIESIISTLT
Tociluzimab-IL-2-variant-fusion-HC-2
(SEQ ID NO: 257)
QVQLQESGPGLVRPSQTLSLICTVSGYSITSDHAWSWVRQPPGRGLEWIGYISYSGITTYNP
SLKSRVTMLRDTSKNQFSLRLSSVTAADTAVYYCARSLARTTAMDYWGQGSLVTVSSASTKG
PSVFPLAPSSKSTSGGTAALGCLVKDYFPEPVTVSWNSGALTSGVHTFPAVLQSSGLYSLSS
VVTVPSSSLGTQTYICNVNHKPSNTKVDKKVEPKSCDKTHTCPPCPAPEAAGAPSVFLFPPK
PKDTLMISRTPEVTCVVVDVSHEDPEVKFNWYVDGVEVHNAKTKPREEQYNSTYRVVSVLTV
LHQDWLNGKEYKCKVSNKALPAPIEKTISKAKGQPREPQVYTLPPSRDELTKNQVSLTCLVK
GFYPSDIAVEWESNGQPENNYKTIPPVLDSDGSFFLYSKLTVDKSRWQQGNVFSCSVMHEAL
HNHYTQKSLSLSPGGGGSGGGSAPTSSSTKKTQLQLEHLLLSLQMILNGINNYKNPKLTRML
TFKFYMPKKATELKHLQCLEEELKPLEEVLNLAQSKNFHLRPRDLISNINVIVLELKGSETT
FMCEYADETATIVEFLNRWITFIQSIISTLT
Tociluzimab-IL-2-variant-fusion-HC-3
(SEQ ID NO: 258)
QVQLQESGPGLVRPSQTLSLICTVSGYSITSDHAWSWVRQPPGRGLEWIGYISYSGITTYNP
SLKSRVTMLRDTSKNQFSLRLSSVTAADTAVYYCARSLARTTAMDYWGQGSLVTVSSASTKG
PSVFPLAPSSKSTSGGTAALGCLVKDYFPEPVTVSWNSGALTSGVHTFPAVLQSSGLYSLSS
VVTVPSSSLGTQTYICNVNHKPSNTKVDKKVEPKSCDKTHTCPPCPAPEAAGAPSVFLFPPK
PKDTLMISRTPEVTCVVVDVSHEDPEVKFNWYVDGVEVHNAKTKPREEQYNSTYRVVSVLTV
LHQDWLNGKEYKCKVSNKALPAPIEKTISKAKGQPREPQVYTLPPSRDELTKNQVSLTCLVK
GFYPSDIAVEWESNGQPENNYKTIPPVLDSDGSFFLYSKLTVDKSRWQQGNVFSCSVMHEAL
HNHYTQKSLSLSPGGGGSGGGSAPTSSSTKKTQLQLEHLLLNLQMILNGINNYKNPKLTRML
TFKFYMPKKATELKHLQCLEEELKPLEEVLNLAQSKNFHLRPRDLISNINVIVLELKGSETT
FMCEYADETATIVEFLNRWITFIQSIISTLT
Tociluzimab-IL-2-variant-fusion-HC-4
(SEQ ID NO: 259)
QVQLQESGPGLVRPSQTLSLICTVSGYSITSDHAWSWVRQPPGRGLEWIGYISYSGITTYNP
SLKSRVTMLRDTSKNQFSLRLSSVTAADTAVYYCARSLARTTAMDYWGQGSLVTVSSASTKG
PSVFPLAPSSKSTSGGTAALGCLVKDYFPEPVTVSWNSGALTSGVHTFPAVLQSSGLYSLSS
VVTVPSSSLGTQTYICNVNHKPSNTKVDKKVEPKSCDKTHTCPPCPAPEAAGAPSVFLFPPK
PKDTLMISRTPEVTCVVVDVSHEDPEVKFNWYVDGVEVHNAKTKPREEQYNSTYRVVSVLTV
LHQDWLNGKEYKCKVSNKALPAPIEKTISKAKGQPREPQVYTLPPSRDELTKNQVSLTCLVK
GFYPSDIAVEWESNGQPENNYKTIPPVLDSDGSFFLYSKLTVDKSRWQQGNVFSCSVMHEAL
HNHYTQKSLSLSPGGGGSGGGSAPTSSSTKKTQLQLEHLLLTLQMILNGINNYKNPKLTRML
TFKFYMPKKATELKHLQCLEEELKPLEEVLNLAOSKNFHLRPRDLISNINVIVLELKGSETT
FMCEYADETATIVEFLNRWITFIQSIISTLT
Tociluzimab-IL-2-variant-fusion-Knob-HC-4
(SEQ ID NO: 260)
QVQLQESGPGLVRPSQTLSLICTVSGYSITSDHAWSWVRQPPGRGLEWIGYISYSGITTYNP
SLKSRVTMLRDTSKNQFSLRLSSVTAADTAVYYCARSLARTTAMDYWGQGSLVTVSSASTKG
PSVFPLAPSSKSTSGGTAALGCLVKDYFPEPVTVSWNSGALTSGVHTFPAVLQSSGLYSLSS
VVTVPSSSLGTQTYICNVNHKPSNTKVDKKVEPKSCDKTHTCPPCPAPEAAGAPSVFLFPPK
PKDTLMISRTPEVTCVVVDVSHEDPEVKFNWYVDGVEVHNAKTKPREEQYNSTYRVVSVLTV
LHQDWLNGKEYKCKVSNKALPAPIEKTISKAKGQPREPQVCTLPPSRDELTKNQVSLWCLVK
GFYPSDIAVEWESNGQPENNYKTTPPVLDSDGSFFLYSKLTVDKSRWQQGNVFSCSVMHEAL
HNHYTQKSLSLSPGGGGSGGGSAPTSSSTKKTQLQLEHLLLTLQMILNGINNYKNPKLTRML
TFKFYMPKKATELKHLQCLEEELKPLEEVLNLAQSKNFHLRPRDLISNINVIVLELKGSETT
FMCEYADETATIVEFLNRWITFIQSIISTLT
Tociluzimab-IL-2-variant-fusion-HC-5
(SEQ ID NO: 261)
QVQLQESGPGLVRPSQTLSLICTVSGYSITSDHAWSWVRQPPGRGLEWIGYISYSGITTYNP
SLKSRVTMLRDTSKNQFSLRLSSVTAADTAVYYCARSLARTTAMDYWGQGSLVTVSSASTKG
PSVFPLAPSSKSTSGGTAALGCLVKDYFPEPVTVSWNSGALTSGVHTFPAVLQSSGLYSLSS
VVTVPSSSLGTQTYICNVNHKPSNTKVDKKVEPKSCDKTHTCPPCPAPEAAGAPSVFLFPPK
PKDTLMISRTPEVTCVVVDVSHEDPEVKFNWYVDGVEVHNAKTKPREEQYNSTYRVVSVLTV
LHQDWLNGKEYKCKVSNKALPAPIEKTISKAKGQPREPQVYTLPPSRDELTKNQVSLTCLVK
GFYPSDIAVEWESNGQPENNYKTIPPVLDSDGSFFLYSKLTVDKSRWQQGNVFSCSVMHEAL
HNHYTQKSLSLSPGGGGSGGGSAPTSSSTKKTQLQLEHLLLTLQMILNGINNYKNPKLTRML
TFKFYMPKKATELKHLQCLEEELKPLEEVLNLAOSKNFHLRPRDLISNINVIVLELKGSETT
FMCEYADETATIVEFLNRWITFIESIISTLT
Tociluzimab-IL-2-variant-fusion-Knob-HC-5
(SEQ ID NO: 262)
QVQLQESGPGLVRPSQTLSLICTVSGYSITSDHAWSWVRQPPGRGLEWIGYISYSGITTYNP
SLKSRVTMLRDTSKNQFSLRLSSVTAADTAVYYCARSLARTTAMDYWGQGSLVTVSSASTKG
PSVFPLAPSSKSTSGGTAALGCLVKDYFPEPVTVSWNSGALTSGVHTFPAVLQSSGLYSLSS
VVTVPSSSLGTQTYICNVNHKPSNTKVDKKVEPKSCDKTHTCPPCPAPEAAGAPSVFLFPPK
PKDTLMISRTPEVTCVVVDVSHEDPEVKFNWYVDGVEVHNAKTKPREEQYNSTYRVVSVLTV
LHQDWLNGKEYKCKVSNKALPAPIEKTISKAKGQPREPQVCTLPPSRDELTKNQVSLWCLVK
GFYPSDIAVEWESNGQPENNYKTTPPVLDSDGSFFLYSKLTVDKSRWQQGNVFSCSVMHEAL
HNHYTQKSLSLSPGGGGSGGGSAPTSSSTKKTQLQLEHLLLTLQMILNGINNYKNPKLTRML
TFKFYMPKKATELKHLQCLEEELKPLEEVLNLAQSKNFHLRPRDLISNINVIVLELKGSETT
FMCEYADETATIVEFLNRWITFIESIISTLT
Tociluzimab-IL-2-variant-fusion-HC-6
(SEQ ID NO: 263)
QVQLQESGPGLVRPSQTLSLICTVSGYSITSDHAWSWVRQPPGRGLEWIGYISYSGITTYNP
SLKSRVTMLRDTSKNQFSLRLSSVTAADTAVYYCARSLARTTAMDYWGQGSLVTVSSASTKG
PSVFPLAPSSKSTSGGTAALGCLVKDYFPEPVTVSWNSGALTSGVHTFPAVLQSSGLYSLSS
VVTVPSSSLGTQTYICNVNHKPSNTKVDKKVEPKSCDKTHTCPPCPAPEAAGAPSVFLFPPK
PKDTLMISRTPEVTCVVVDVSHEDPEVKFNWYVDGVEVHNAKTKPREEQYNSTYRVVSVLTV
LHQDWLNGKEYKCKVSNKALPAPIEKTISKAKGQPREPQVYTLPPSRDELTKNQVSLTCLVK
GFYPSDIAVEWESNGQPENNYKTIPPVLDSDGSFFLYSKLTVDKSRWQQGNVFSCSVMHEAL
HNHYTQKSLSLSPGGGGSGGGSAPTSSSTKKTQLQLEHLLLTLQMILNGINNYKNPKLTRML
TFKFYMPKKATELKHLQCLEEELKPLEEVLNLAOSKNFHLRPRDLISNINVIVLELKGSETT
FMCEYADETATIVEFLNRWITFIKSIISTLT
Tociluzimab-IL-2-variant-fusion-Knob-HC-6
(SEQ ID NO: 264)
QVQLQESGPGLVRPSQTLSLICTVSGYSITSDHAWSWVRQPPGRGLEWIGYISYSGITTYNP
SLKSRVTMLRDTSKNQFSLRLSSVTAADTAVYYCARSLARTTAMDYWGQGSLVTVSSASTKG
PSVFPLAPSSKSTSGGTAALGCLVKDYFPEPVTVSWNSGALTSGVHTFPAVLQSSGLYSLSS
VVTVPSSSLGTQTYICNVNHKPSNTKVDKKVEPKSCDKTHTCPPCPAPEAAGAPSVFLFPPK
PKDTLMISRTPEVTCVVVDVSHEDPEVKFNWYVDGVEVHNAKTKPREEQYNSTYRVVSVLTV
LHQDWLNGKEYKCKVSNKALPAPIEKTISKAKGQPREPQVCTLPPSRDELTKNQVSLWCLVK
GFYPSDIAVEWESNGQPENNYKTTPPVLDSDGSFFLYSKLTVDKSRWQQGNVFSCSVMHEAL
HNHYTQKSLSLSPGGGGSGGGSAPTSSSTKKTQLQLEHLLLTLQMILNGINNYKNPKLTRML
TFKFYMPKKATELKHLQCLEEELKPLEEVLNLAQSKNFHLRPRDLISNINVIVLELKGSETT
FMCEYADETATIVEFLNRWITFIKSIISTLT
Tociluzimab-IL-2-variant-fusion-HC-7
(SEQ ID NO: 265)
QVQLQESGPGLVRPSQTLSLICTVSGYSITSDHAWSWVRQPPGRGLEWIGYISYSGITTYNP
SLKSRVTMLRDTSKNQFSLRLSSVTAADTAVYYCARSLARTTAMDYWGQGSLVTVSSASTKG
PSVFPLAPSSKSTSGGTAALGCLVKDYFPEPVTVSWNSGALTSGVHTFPAVLQSSGLYSLSS
VVTVPSSSLGTQTYICNVNHKPSNTKVDKKVEPKSCDKTHTCPPCPAPEAAGAPSVFLFPPK
PKDTLMISRTPEVTCVVVDVSHEDPEVKFNWYVDGVEVHNAKTKPREEQYNSTYRVVSVLTV
LHQDWLNGKEYKCKVSNKALPAPIEKTISKAKGQPREPQVYTLPPSRDELTKNQVSLTCLVK
GFYPSDIAVEWESNGQPENNYKTIPPVLDSDGSFFLYSKLTVDKSRWQQGNVFSCSVMHEAL
HNHYTQKSLSLSPGGGGSGGGSAPTSSSTKKTQLQLEHLLLQLQMILNGINNYKNPKLTRML
TFKFYMPKKATELKHLQCLEEELKPLEEVLNLAQSKNFHLRPRDLISNINVIVLELKGSETT
FMCEYADETATIVEFLNRWITFIQSIISTLT
Tociluzimab-IL-2-variant-fusion-Knob-HC-7
(SEQ ID NO: 266)
QVQLQESGPGLVRPSQTLSLICTVSGYSITSDHAWSWVROPPGRGLEWIGYISYSGITTYNP
SLKSRVTMLRDTSKNQFSLRLSSVTAADTAVYYCARSLARTTAMDYWGQGSLVTVSSASTKG
PSVFPLAPSSKSTSGGTAALGCLVKDYFPEPVTVSWNSGALTSGVHTFPAVLQSSGLYSLSS
VVTVPSSSLGTQTYICNVNHKPSNTKVDKKVEPKSCDKTHTCPPCPAPEAAGAPSVFLFPPK
PKDTLMISRTPEVTCVVVDVSHEDPEVKFNWYVDGVEVHNAKTKPREEQYNSTYRVVSVLTV
LHQDWLNGKEYKCKVSNKALPAPIEKTISKAKGQPREPQVCTLPPSRDELTKNQVSLWCLVK
GFYPSDIAVEWESNGQPENNYKTTPPVLDSDGSFFLYSKLTVDKSRWQQGNVFSCSVMHEAL
HNHYTQKSLSLSPGGGGSGGGSAPTSSSTKKTQLQLEHLLLQLQMILNGINNYKNPKLTRML
TFKFYMPKKATELKHLQCLEEELKPLEEVLNLAQSKNFHLRPRDLISNINVIVLELKGSETT
FMCEYADETATIVEFLNRWITFIQSIISTLT
Tociluzimab-IL-2-variant-fusion-HC-8
(SEQ ID NO: 267)
QVQLQESGPGLVRPSQTLSLICTVSGYSITSDHAWSWVROPPGRGLEWIGYISYSGITTYNP
SLKSRVTMLRDTSKNQFSLRLSSVTAADTAVYYCARSLARTTAMDYWGQGSLVTVSSASTKG
PSVFPLAPSSKSTSGGTAALGCLVKDYFPEPVTVSWNSGALTSGVHTFPAVLQSSGLYSLSS
VVTVPSSSLGTQTYICNVNHKPSNTKVDKKVEPKSCDKTHTCPPCPAPEAAGAPSVFLFPPK
PKDTLMISRTPEVTCVVVDVSHEDPEVKFNWYVDGVEVHNAKTKPREEQYNSTYRVVSVLTV
LHQDWLNGKEYKCKVSNKALPAPIEKTISKAKGQPREPQVYTLPPSRDELTKNQVSLTCLVK
GFYPSDIAVEWESNGQPENNYKTIPPVLDSDGSFFLYSKLTVDKSRWQQGNVFSCSVMHEAL
HNHYTQKSLSLSPGGGGSGGGSAPTSSSTKKTQLQLEHLLNDLQMILNGINNYKNPKLTRML
TFKFYMPKKATELKHLQCLEEELKPLEEVLNLAQSKNFHLRPRDLISNINVIVLELKGSETT
FMCEYADETATIVEFLNRWITFIESIISTLT
Tociluzimab-IL-2-variant-fusion-HC-9
(SEQ ID NO: 268)
QVQLQESGPGLVRPSQTLSLICTVSGYSITSDHAWSWVROPPGRGLEWIGYISYSGITTYNP
SLKSRVTMLRDTSKNQFSLRLSSVTAADTAVYYCARSLARTTAMDYWGQGSLVTVSSASTKG
PSVFPLAPSSKSTSGGTAALGCLVKDYFPEPVTVSWNSGALTSGVHTFPAVLQSSGLYSLSS
VVTVPSSSLGTQTYICNVNHKPSNTKVDKKVEPKSCDKTHTCPPCPAPEAAGAPSVFLFPPK
PKDTLMISRTPEVTCVVVDVSHEDPEVKFNWYVDGVEVHNAKTKPREEQYNSTYRVVSVLTV
LHQDWLNGKEYKCKVSNKALPAPIEKTISKAKGQPREPQVYTLPPSRDELTKNQVSLTCLVK
GFYPSDIAVEWESNGQPENNYKTIPPVLDSDGSFFLYSKLTVDKSRWQQGNVFSCSVMHEAL
HNHYTQKSLSLSPGGGGSGGGSAPTSSSTKKTQLQLEHLLNDLQMILNGINNYKNPKLTRML
TFKFYMPKKATELKHLQCLEEELKPLEEVLNLAQSKNFHLRPRDLISNINVIVLELKGSETT
FMCEYADETATIVEFLNRWITFIKSIISTLT
Belimumab-Lλ
(SEQ ID NO: 269)
SSELTQDPAVSVALGQTVRVTCQGDSLRSYYASWYQQKPGQAPVLVIYGKNNRPSGIPDRFS
GSSSGNTASLTITGAQAEDEADYYCSSRDSSGNHWVFGGGTELTVLGQPKAAPSVTLFPPSS
EELQANKATLVCLISDFYPGAVTVAWKADSSPVKAGVETTTPSKQSNNKYAASSYLSLTPEQ
WKSHRSYSCQVTHEGSTVEKTVAPTECS
Belimumab-Hole-HC
(SEQ ID NO: 270)
QVQLQQSGAEVKKPGSSVRVSCKASGGTFNNNAINWVRQAPGQGLEWMGGIIPMFGTAKYSQ
NFQGRVAITADESTGTASMELSSLRSEDTAVYYCARSRDLLLFPHHALSPWGRGTMVTVSSA
STKGPSVFPLAPSSKSTSGGTAALGCLVKDYFPEPVTVSWNSGALTSGVHTFPAVLQSSGLY
SLSSVVTVPSSSLGTQTYICNVNHKPSNTKVDKKVEPKSCDKTHTCPPCPAPEAAGAPSVFL
FPPKPKDTLMISRTPEVTCVVVDVSHEDPEVKFNWYVDGVEVHNAKTKPREEQYNSTYRVVS
VLTVLHQDWLNGKEYKCKVSNKALPAPIEKTISKAKGQPREPQVYTLPPCRDELTKNQVSLS
CAVKGFYPSDIAVEWESNGQPENNYKTTPPVLDSDGSFFLVSKLTVDKSRWQQGNVFSCSVM
HEALHNHYTQKSLSLSPG
Belimumab-IL-2-variant-fusion-HC-1
(SEQ ID NO: 271)
QVQLQQSGAEVKKPGSSVRVSCKASGGTFNNNAINWVRQAPGQGLEWMGGIIPMFGTAKYSQ
NFQGRVAITADESTGTASMELSSLRSEDTAVYYCARSRDLLLFPHHALSPWGRGTMVTVSSA
STKGPSVFPLAPSSKSTSGGTAALGCLVKDYFPEPVTVSWNSGALTSGVHTFPAVLQSSGLY
SLSSVVTVPSSSLGTQTYICNVNHKPSNTKVDKKVEPKSCDKTHTCPPCPAPEAAGAPSVFL
FPPKPKDTLMISRTPEVTCVVVDVSHEDPEVKFNWYVDGVEVHNAKTKPREEQYNSTYRVVS
VLTVLHQDWLNGKEYKCKVSNKALPAPIEKTISKAKGQPREPQVYTLPPSRDELTKNQVSLT
CLVKGFYPSDIAVEWESNGQPENNYKTTPPVLDSDGSFFLYSKLTVDKSRWQQGNVFSCSVM
HEALHNHYTQKSLSLSPGGGGSGGGSAPTSSSTKKTQLQLEHLLHDLQMILNGINNYKNPKL
TRMLTFKFYMPKKATELKHLQCLEEELKPLEEVLNLAQSKNFHLRPRDLISNINVIVLELKG
SETTFMCEYADETATIVEFLNRWITFIESIISTLT
Belimumab-IL-2-variant-fusion-HC-2
(SEQ ID NO: 272)
QVQLQQSGAEVKKPGSSVRVSCKASGGTFNNNAINWVRQAPGQGLEWMGGIIPMFGTAKYSQ
NFQGRVAITADESTGTASMELSSLRSEDTAVYYCARSRDLLLFPHHALSPWGRGTMVTVSSA
STKGPSVFPLAPSSKSTSGGTAALGCLVKDYFPEPVTVSWNSGALTSGVHTFPAVLQSSGLY
SLSSVVTVPSSSLGTQTYICNVNHKPSNTKVDKKVEPKSCDKTHTCPPCPAPEAAGAPSVFL
FPPKPKDTLMISRTPEVTCVVVDVSHEDPEVKFNWYVDGVEVHNAKTKPREEQYNSTYRVVS
VLTVLHQDWLNGKEYKCKVSNKALPAPIEKTISKAKGQPREPQVYTLPPSRDELTKNQVSLT
CLVKGFYPSDIAVEWESNGQPENNYKTTPPVLDSDGSFFLYSKLTVDKSRWQQGNVFSCSVM
HEALHNHYTQKSLSLSPGGGGSGGGSAPTSSSTKKTQLQLEHLLLQLQMILNGINNYKNPKL
TRMLTFKFYMPKKATELKHLQCLEEELKPLEEVLNLAQSKNFHLRPRDLISNINVIVLELKG
SETTFMCEYADETATIVEFLNRWITFIQSIISTLT
Belimumab-IL-2-variant-fusion-Knob-HC-3
(SEQ ID NO: 273)
QVQLQQSGAEVKKPGSSVRVSCKASGGTFNNNAINWVRQAPGQGLEWMGGIIPMFGTAKYSQ
NFQGRVAITADESTGTASMELSSLRSEDTAVYYCARSRDLLLFPHHALSPWGRGTMVTVSSA
STKGPSVFPLAPSSKSTSGGTAALGCLVKDYFPEPVTVSWNSGALTSGVHTFPAVLQSSGLY
SLSSVVTVPSSSLGTQTYICNVNHKPSNTKVDKKVEPKSCDKTHTCPPCPAPEAAGAPSVFL
FPPKPKDTLMISRTPEVTCVVVDVSHEDPEVKFNWYVDGVEVHNAKTKPREEQYNSTYRVVS
VLTVLHQDWLNGKEYKCKVSNKALPAPIEKTISKAKGQPREPQVCTLPPSRDELTKNQVSLW
CLVKGFYPSDIAVEWESNGQPENNYKTTPPVLDSDGSFFLYSKLTVDKSRWQQGNVFSCSVM
HEALHNHYTQKSLSLSPGGGGSGGGSAPTSSSTKKTQLQLEHLLLQLQMILNGINNYKNPKL
TRMLTFKFYMPKKATELKHLQCLEEELKPLEEVLNLAQSKNFHLRPRDLISNINVIVLELKG
SETTFMCEYADETATIVEFLNRWITFIQSIISTLT
Belimumab-IL-2-variant-fusion-Knob-HC-4
(SEQ ID NO: 274)
QVQLQQSGAEVKKPGSSVRVSCKASGGTFNNNAINWVRQAPGQGLEWMGGIIPMFGTAKYSQ
NFQGRVAITADESTGTASMELSSLRSEDTAVYYCARSRDLLLFPHHALSPWGRGTMVTVSSA
STKGPSVFPLAPSSKSTSGGTAALGCLVKDYFPEPVTVSWNSGALTSGVHTFPAVLQSSGLY
SLSSVVTVPSSSLGTQTYICNVNHKPSNTKVDKKVEPKSCDKTHTCPPCPAPEAAGAPSVFL
FPPKPKDTLMISRTPEVTCVVVDVSHEDPEVKFNWYVDGVEVHNAKTKPREEQYNSTYRVVS
VLTVLHQDWLNGKEYKCKVSNKALPAPIEKTISKAKGQPREPQVCTLPPSRDELTKNQVSLW
CLVKGFYPSDIAVEWESNGQPENNYKTTPPVLDSDGSFFLYSKLTVDKSRWQQGNVFSCSVM
HEALHNHYTQKSLSLSPGGGGSGGGSAPTSSSTKKTQLQLEHLLRDLQMILNGINNYKNPKL
TRMLTFKFYMPKKATELKHLQCLEEELKPLEEVLNLAQSKNFHLRPRDLISNINVIVLELKG
SETTFMCEYADETATIVEFLNRWITFIKSIISTLT
Human IL-2 Q126R variant sequence
(SEQ ID NO: 275)
APTSSSTKKTQLQLEHLLLDLQMILNGINNYKNPKLTRMLTFKFYMPKKATELKHLQCLEEE
LKPLEEVLNLAQSKNFHLRPRDLISNINVIVLELKGSETTFMCEYADETATIVEFLNRWITF
SRSIISTLT
Human IL-2 Q126S variant sequence
(SEQ ID NO: 276)
APTSSSTKKTQLQLEHLLLDLQMILNGINNYKNPKLTRMLTFKFYMPKKATELKHLQCLEEE
LKPLEEVLNLAQSKNFHLRPRDLISNINVIVLELKGSETTFMCEYADETATIVEFLNRWITF
SSSIISTLT
Human IL-2 Q126T variant sequence
(SEQ ID NO: 277)
APTSSSTKKTQLQLEHLLLDLQMILNGINNYKNPKLTRMLTFKFYMPKKATELKHLQCLEEE
LKPLEEVLNLAQSKNFHLRPRDLISNINVIVLELKGSETTFMCEYADETATIVEFLNRWITF
STSIISTLT
Human IL-2 L19D/S125I/Q126E variant sequence
(SEQ ID NO: 278)
APTSSSTKKTQLQLEHLLDDLQMILNGINNYKNPKLTRMLTFKFYMPKKATELKHLQCLEEE
LKPLEEVLNLAQSKNFHLRPRDLISNINVIVLELKGSETTFMCEYADETATIVEFLNRWITF
IESIISTLT
Human IL-2 D20E/S125I/Q126E variant sequence
(SEQ ID NO: 279)
APTSSSTKKTQLQLEHLLLELQMILNGINNYKNPKLTRMLTFKFYMPKKATELKHLQCLEEE
LKPLEEVLNLAQSKNFHLRPRDLISNINVIVLELKGSETTFMCEYADETATIVEFLNRWITF
IESIISTLT
Human IL-2 L19N/S125I/Q126E variant sequence
(SEQ ID NO: 280)
APTSSSTKKTQLQLEHLLNDLQMILNGINNYKNPKLTRMLTFKFYMPKKATELKHLQCLEEE
LKPLEEVLNLAQSKNFHLRPRDLISNINVIVLELKGSETTFMCEYADETATIVEFLNRWITF
IESIISTLT
Human IL-2 L19N/S125I/Q126K variant sequence
(SEQ ID NO: 281)
APTSSSIKKTQLQLEHLLNDLQMILNGINNYKNPKLTRMLTFKFYMPKKATELKHLQCLEEE
LKPLEEVLNLAQSKNFHLRPRDLISNINVIVLELKGSETTFMCEYADETATIVEFLNRWITF
IKSIISTLT
Human IL-2 L19H/S125I/Q126D variant sequence
(SEQ ID NO: 282)
APTSSSIKKTQLQLEHLLHDLQMILNGINNYKNPKLTRMLTFKFYMPKKATELKHLQCLEEE
LKPLEEVLNLAQSKNFHLRPRDLISNINVIVLELKGSETTFMCEYADETATIVEFLNRWITF
IDSIISTLT
Human IL-2 L19H/S125I/Q126H variant sequence
(SEQ ID NO: 283)
APTSSSIKKTQLQLEHLLHDLQMILNGINNYKNPKLTRMLTFKFYMPKKATELKHLQCLEEE
LKPLEEVLNLAQSKNFHLRPRDLISNINVIVLELKGSETTFMCEYADETATIVEFLNRWITF
IHSIISTLT
Human IL-2 L19H/S125I/Q126N variant sequence
(SEQ ID NO: 284)
APTSSSIKKTQLQLEHLLHDLQMILNGINNYKNPKLTRMLTFKFYMPKKATELKHLQCLEEE
LKPLEEVLNLAQSKNFHLRPRDLISNINVIVLELKGSETTFMCEYADETATIVEFLNRWITF
INSIISTLT
Human IL-2 L19H/S125I/Q126R variant sequence
(SEQ ID NO: 285)
APTSSSIKKTQLQLEHLLHDLQMILNGINNYKNPKLTRMLTFKFYMPKKATELKHLQCLEEE
LKPLEEVLNLAQSKNFHLRPRDLISNINVIVLELKGSETTFMCEYADETATIVEFLNRWITF
IRSIISTLT
Human IL-2 L19H/S125I/Q126S variant sequence
(SEQ ID NO: 286)
APTSSSIKKTQLQLEHLLHDLQMILNGINNYKNPKLTRMLTFKFYMPKKATELKHLQCLEEE
LKPLEEVLNLAQSKNFHLRPRDLISNINVIVLELKGSETTFMCEYADETATIVEFLNRWITF
ISSIISTLT
Human IL-2 L19H/S125I/Q126T variant sequence
(SEQ ID NO: 287)
APTSSSIKKTQLQLEHLLHDLQMILNGINNYKNPKLTRMLTFKFYMPKKATELKHLQCLEEE
LKPLEEVLNLAQSKNFHLRPRDLISNINVIVLELKGSETTFMCEYADETATIVEFLNRWITF
ITSIISTLT
Human IL-2 L19H/S125I/Q126E + 5-aa N-terminal deletion variant sequence
(SEQ ID NO: 288)
STKKTQLQLEHLLHDLQMILNGINNYKNPKLTRMLTFKFYMPKKATELKHLQCLEEELKPLE
EVLNLAQSKNFHLRPRDLISNINVIVLELKGSETTFMCEYADETATIVEFLNRWITFIESII
STLT
Human IL-2 L19H/S125I/Q126E + 7-aa N-terminal deletion variant sequence
(SEQ ID NO: 289)
KKTQLQLEHLLHDLQMILNGINNYKNPKLTRMLTFKFYMPKKATELKHLQCLEEELKPLEEV
LNLAQSKNFHLRPRDLISNINVIVLELKGSETTFMCEYADETATIVEFLNRWITFIESIIST
LT
Human IL-2 L19H/S125I/Q126E + 9-aa N-terminal deletion variant sequence
(SEQ ID NO: 290)
TQLQLEHLLHDLQMILNGINNYKNPKLTRMLTFKFYMPKKATELKHLQCLEEELKPLEEVLN
LAQSKNFHLRPRDLISNINVIVLELKGSETTFMCEYADETATIVEFLNRWITFIESIISTLT
Human IL-2 L19H/S125I/Q126E + 11-aa N-terminal deletion variant sequence
(SEQ ID NO: 291)
LQLEHLLHDLQMILNGINNYKNPKLTRMLTFKFYMPKKATELKHLQCLEEELKPLEEVLNLA
QSKNFHLRPRDLISNINVIVLELKGSETTFMCEYADETATIVEFLNRWITFIESIISTLT
Human IL-2 L19R/S125I/Q126E variant sequence
(SEQ ID NO: 292)
APTSSSTKKTQLQLEHLLRDLQMILNGINNYKNPKLTRMLTFKFYMPKKATELKHLQCLEEE
LKPLEEVLNLAQSKNFHLRPRDLISNINVIVLELKGSETTFMCEYADETATIVEFLNRWITF
IESIISTLT
Human IL-2 P65A/S125I variant sequence
(SEQ ID NO: 293)
APTSSSTKKTQLQLEHLLLDLQMILNGINNYKNPKLTRMLTFKFYMPKKATELKHLQCLEEE
LKALEEVLNLAQSKNFHLRPRDLISNINVIVLELKGSETTFMCEYADETATIVEFLNRWITF
IQSIISTLT
Human IL-2 P65E/S125I variant sequence
(SEQ ID NO: 294)
APTSSSTKKTQLQLEHLLLDLQMILNGINNYKNPKLTRMLTFKFYMPKKATELKHLQCLEEE
LKELEEVLNLAQSKNFHLRPRDLISNINVIVLELKGSETTFMCEYADETATIVEFLNRWITF
IQSIISTLT
Human IL-2 P65H/S125I variant sequence
(SEQ ID NO: 295)
APTSSSTKKTQLQLEHLLLDLQMILNGINNYKNPKLTRMLTFKFYMPKKATELKHLQCLEEE
LKHLEEVLNLAQSKNFHLRPRDLISNINVIVLELKGSETTFMCEYADETATIVEFLNRWITF
IQSIISTLT
Human IL-2 P65K/S125I variant sequence
(SEQ ID NO: 296)
APTSSSTKKTQLQLEHLLLDLQMILNGINNYKNPKLTRMLTFKFYMPKKATELKHLQCLEEE
LKKLEEVLNLAQSKNFHLRPRDLISNINVIVLELKGSETTFMCEYADETATIVEFLNRWITF
IQSIISTLT
Human IL-2 P65N/S125I variant sequence
(SEQ ID NO: 297)
APTSSSTKKTQLQLEHLLLDLQMILNGINNYKNPKLTRMLTFKFYMPKKATELKHLQCLEEE
LKNLEEVLNLAQSKNFHLRPRDLISNINVIVLELKGSETTFMCEYADETATIVEFLNRWITF
IQSIISTLT
Human IL-2 P65Q/S125I variant sequence
(SEQ ID NO: 298)
APTSSSTKKTQLQLEHLLLDLQMILNGINNYKNPKLTRMLTFKFYMPKKATELKHLQCLEEE
LKQLEEVLNLAQSKNFHLRPRDLISNINVIVLELKGSETTFMCEYADETATIVEFLNRWITF
IQSIISTLT
Human IL-2 P65R/S125I variant sequence
(SEQ ID NO: 299)
APTSSSTKKTQLQLEHLLLDLQMILNGINNYKNPKLTRMLTFKFYMPKKATELKHLQCLEEE
LKRLEEVLNLAQSKNFHLRPRDLISNINVIVLELKGSETTFMCEYADETATIVEFLNRWITF
IQSIISTLT
P-0860
(SEQ ID NO: 300)
DKTHTCPPCPAPEAAGAPSVFLFPPKPKDTLMISRTPEVTCVVVDVSHEDPEVKFNWYVDGV
EVHNAKTKPREEQYNSTYRVVSVLTVLHQDWLNGKEYKCKVSNKALPAPIEKTISKAKGQPR
EPQVYTLPPSRDELTKNQVSLTCLVKGFYPSDIAVEWESNGQPENNYKTTPPVLDSDGSFFL
YSKLTVDKSRWQQGNVFSCSVMHEALHNHYTQKSLSLSPGGGGSGGGSAPTSSSTKKTQLQL
EHLLDDLQMILNGINNYKNPKLTRMLTFKFYMPKKATELKHLQCLEEELKPLEEVLNLAQSK
NFHLRPRDLISNINVIVLELKGSETTFMCEYADETATIVEFLNRWITFIESIISTLT
P-0861
(SEQ ID NO: 301)
DKTHTCPPCPAPEAAGAPSVFLFPPKPKDTLMISRTPEVTCVVVDVSHEDPEVKFNWYVDGV
EVHNAKTKPREEQYNSTYRVVSVLTVLHQDWLNGKEYKCKVSNKALPAPIEKTISKAKGQPR
EPQVYTLPPSRDELTKNQVSLTCLVKGFYPSDIAVEWESNGQPENNYKTTPPVLDSDGSFFL
YSKLTVDKSRWQQGNVFSCSVMHEALHNHYTQKSLSLSPGGGGSGGGSAPTSSSTKKTQLQL
EHLLLELQMILNGINNYKNPKLTRMLTFKFYMPKKATELKHLQCLEEELKPLEEVLNLAQSK
NFHLRPRDLISNINVIVLELKGSETTFMCEYADETATIVEFLNRWITFIESIISTLT
P-0862
(SEQ ID NO: 302)
DKTHTCPPCPAPEAAGAPSVFLFPPKPKDTLMISRTPEVTCVVVDVSHEDPEVKFNWYVDGV
EVHNAKTKPREEQYNSTYRVVSVLTVLHQDWLNGKEYKCKVSNKALPAPIEKTISKAKGQPR
EPQVYTLPPSRDELTKNQVSLTCLVKGFYPSDIAVEWESNGQPENNYKTTPPVLDSDGSFFL
YSKLTVDKSRWQQGNVFSCSVMHEALHNHYTQKSLSLSPGGGGSGGGSSTKKTQLQLEHLLH
DLQMILNGINNYKNPKLTRMLTFKFYMPKKATELKHLQCLEEELKPLEEVLNLAQSKNFHLR
PRDLISNINVIVLELKGSETTFMCEYADETATIVEFLNRWITFIESIISTLT
P-0863
(SEQ ID NO: 303)
DKTHTCPPCPAPEAAGAPSVFLFPPKPKDTLMISRTPEVTCVVVDVSHEDPEVKFNWYVDGV
EVHNAKTKPREEQYNSTYRVVSVLTVLHQDWLNGKEYKCKVSNKALPAPIEKTISKAKGQPR
EPQVYTLPPSRDELTKNQVSLTCLVKGFYPSDIAVEWESNGQPENNYKTTPPVLDSDGSFFL
YSKLTVDKSRWQQGNVFSCSVMHEALHNHYTQKSLSLSPGGGGSGGGSKKTQLQLEHLLHDL
QMILNGINNYKNPKLTRMLTFKFYMPKKATELKHLQCLEEELKPLEEVLNLAQSKNFHLRPR
DLISNINVIVLELKGSETTFMCEYADETATIVEFLNRWITFIESIISTLT
P-0864
(SEQ ID NO: 304)
DKTHTCPPCPAPEAAGAPSVFLFPPKPKDTLMISRTPEVTCVVVDVSHEDPEVKFNWYVDGV
EVHNAKTKPREEQYNSTYRVVSVLTVLHQDWLNGKEYKCKVSNKALPAPIEKTISKAKGQPR
EPQVYTLPPSRDELTKNQVSLTCLVKGFYPSDIAVEWESNGQPENNYKTTPPVLDSDGSFFL
YSKLTVDKSRWQQGNVFSCSVMHEALHNHYTQKSLSLSPGGGGSGGGSTQLQLEHLLHDLQM
ILNGINNYKNPKLTRMLTFKFYMPKKATELKHLQCLEEELKPLEEVLNLAQSKNFHLRPRDL
ISNINVIVLELKGSETTFMCEYADETATIVEFLNRWITFIESIISTLT
P-0865
(SEQ ID NO: 305)
DKTHTCPPCPAPEAAGAPSVFLFPPKPKDTLMISRTPEVTCVVVDVSHEDPEVKFNWYVDGV
EVHNAKTKPREEQYNSTYRVVSVLTVLHQDWLNGKEYKCKVSNKALPAPIEKTISKAKGQPR
EPQVYTLPPSRDELTKNQVSLTCLVKGFYPSDIAVEWESNGQPENNYKTTPPVLDSDGSFFL
YSKLTVDKSRWQQGNVFSCSVMHEALHNHYTQKSLSLSPGGGGSGGGSLQLEHLLHDLQMIL
NGINNYKNPKLTRMLTFKFYMPKKATELKHLQCLEEELKPLEEVLNLAQSKNFHLRPRDLIS
NINVIVLELKGSETTFMCEYADETATIVEFLNRWITFIESIISTLT
P-0859
(SEQ ID NO: 306)
DKTHTCPPCPAPEAAGAPSVFLFPPKPKDTLMISRTPEVTCVVVDVSHEDPEVKFNWYVDGV
EVHNAKTKPREEQYNSTYRVVSVLTVLHQDWLNGKEYKCKVSNKALPAPIEKTISKAKGQPR
EPQVYTLPPSRDELTKNQVSLTCLVKGFYPSDIAVEWESNGQPENNYKTTPPVLDSDGSFFL
YSKLTVDKSRWQQGNVFSCSVMHEALHNHYTQKSLSLSPGGGGSGGGSAPTSSSTKKTQLQL
EHLLNDLQMILNGINNYKNPKLTRMLTFKFYMPKKATELKHLQCLEEELKPLEEVLNLAQSK
NFHLRPRDLISNINVIVLELKGSETTFMCEYADETATIVEFLNRWITFIESIISTLT
Tociluzimab-IL-2-variant-fusion-HC-15
(SEQ ID NO: 307)
QVQLQESGPGLVRPSQTLSLICTVSGYSITSDHAWSWVRQPPGRGLEWIGYISYSGITTYNP
SLKSRVTMLRDTSKNQFSLRLSSVTAADTAVYYCARSLARTTAMDYWGQGSLVTVSSASTKG
PSVFPLAPSSKSTSGGTAALGCLVKDYFPEPVTVSWNSGALTSGVHTFPAVLQSSGLYSLSS
VVTVPSSSLGTQTYICNVNHKPSNTKVDKKVEPKSCDKTHTCPPCPAPEAAGAPSVFLFPPK
PKDTLMISRTPEVTCVVVDVSHEDPEVKFNWYVDGVEVHNAKTKPREEQYNSTYRVVSVLTV
LHQDWLNGKEYKCKVSNKALPAPIEKTISKAKGQPREPQVYTLPPSRDELTKNQVSLTCLVK
GFYPSDIAVEWESNGQPENNYKTIPPVLDSDGSFFLYSKLTVDKSRWQQGNVFSCSVMHEAL
HNHYTQKSLSLSPGGGGSGGGSAPTSSSTKKTQLQLEHLLHDLQMILNGINNYKNPKLTRML
TFKFYMPKKATELKHLQCLEEELKPLEEVLNLAQSKNFHLRPRDLISNINVIVLELKGSETT
FMCEYADETATIVEFLNRWITFITSIISTLT
Tociluzimab-IL-2-variant-fusion-HC-10
(SEQ ID NO: 308)
QVQLQESGPGLVRPSQTLSLICTVSGYSITSDHAWSWVRQPPGRGLEWIGYISYSGITTYNP
SLKSRVTMLRDTSKNQFSLRLSSVTAADTAVYYCARSLARTTAMDYWGQGSLVTVSSASTKG
PSVFPLAPSSKSTSGGTAALGCLVKDYFPEPVTVSWNSGALTSGVHTFPAVLQSSGLYSLSS
VVTVPSSSLGTQTYICNVNHKPSNTKVDKKVEPKSCDKTHTCPPCPAPEAAGAPSVFLFPPK
PKDTLMISRTPEVTCVVVDVSHEDPEVKFNWYVDGVEVHNAKTKPREEQYNSTYRVVSVLTV
LHQDWLNGKEYKCKVSNKALPAPIEKTISKAKGQPREPQVYTLPPSRDELTKNQVSLTCLVK
GFYPSDIAVEWESNGQPENNYKTIPPVLDSDGSFFLYSKLTVDKSRWQQGNVFSCSVMHEAL
HNHYTQKSLSLSPGGGGSGGGSAPTSSSTKKTQLQLEHLLHDLQMILNGINNYKNPKLTRML
TFKFYMPKKATELKHLQCLEEELKPLEEVLNLAQSKNFHLRPRDLISNINVIVLELKGSETT
FMCEYADETATIVEFLNRWITFIDSIISTLT
Tociluzimab-IL-2-variant-fusion-HC-11
(SEQ ID NO: 309)
QVQLQESGPGLVRPSQTLSLICTVSGYSITSDHAWSWVRQPPGRGLEWIGYISYSGITTYNP
SLKSRVTMLRDTSKNQFSLRLSSVTAADTAVYYCARSLARTTAMDYWGQGSLVTVSSASTKG
PSVFPLAPSSKSTSGGTAALGCLVKDYFPEPVTVSWNSGALTSGVHTFPAVLQSSGLYSLSS
VVTVPSSSLGTQTYICNVNHKPSNTKVDKKVEPKSCDKTHTCPPCPAPEAAGAPSVFLFPPK
PKDTLMISRTPEVTCVVVDVSHEDPEVKFNWYVDGVEVHNAKTKPREEQYNSTYRVVSVLTV
LHQDWLNGKEYKCKVSNKALPAPIEKTISKAKGQPREPQVYTLPPSRDELTKNQVSLTCLVK
GFYPSDIAVEWESNGQPENNYKTIPPVLDSDGSFFLYSKLTVDKSRWQQGNVFSCSVMHEAL
HNHYTQKSLSLSPGGGGSGGGSAPTSSSTKKTQLQLEHLLHDLQMILNGINNYKNPKLTRML
TFKFYMPKKATELKHLQCLEEELKPLEEVLNLAQSKNFHLRPRDLISNINVIVLELKGSETT
FMCEYADETATIVEFLNRWITFIHSIISTLT
Tociluzimab-IL-2-variant-fusion-HC-12
(SEQ ID NO: 310)
QVQLQESGPGLVRPSQTLSLICTVSGYSITSDHAWSWVRQPPGRGLEWIGYISYSGITTYNP
SLKSRVTMLRDTSKNQFSLRLSSVTAADTAVYYCARSLARTTAMDYWGQGSLVTVSSASTKG
PSVFPLAPSSKSTSGGTAALGCLVKDYFPEPVTVSWNSGALTSGVHTFPAVLQSSGLYSLSS
VVTVPSSSLGTQTYICNVNHKPSNTKVDKKVEPKSCDKTHTCPPCPAPEAAGAPSVFLFPPK
PKDTLMISRTPEVTCVVVDVSHEDPEVKFNWYVDGVEVHNAKTKPREEQYNSTYRVVSVLTV
LHQDWLNGKEYKCKVSNKALPAPIEKTISKAKGQPREPQVYTLPPSRDELTKNQVSLTCLVK
GFYPSDIAVEWESNGQPENNYKTIPPVLDSDGSFFLYSKLTVDKSRWQQGNVFSCSVMHEAL
HNHYTQKSLSLSPGGGGSGGGSAPTSSSTKKTQLQLEHLLHDLQMILNGINNYKNPKLTRML
TFKFYMPKKATELKHLQCLEEELKPLEEVLNLAQSKNFHLRPRDLISNINVIVLELKGSETT
FMCEYADETATIVEFLNRWITFINSIISTLT
Tociluzimab-IL-2-variant-fusion-HC-13
(SEQ ID NO: 311)
QVQLQESGPGLVRPSQTLSLICTVSGYSITSDHAWSWVRQPPGRGLEWIGYISYSGITTYNP
SLKSRVTMLRDTSKNQFSLRLSSVTAADTAVYYCARSLARTTAMDYWGQGSLVTVSSASTKG
PSVFPLAPSSKSTSGGTAALGCLVKDYFPEPVTVSWNSGALTSGVHTFPAVLQSSGLYSLSS
VVTVPSSSLGTQTYICNVNHKPSNTKVDKKVEPKSCDKTHTCPPCPAPEAAGAPSVFLFPPK
PKDTLMISRTPEVTCVVVDVSHEDPEVKFNWYVDGVEVHNAKTKPREEQYNSTYRVVSVLTV
LHQDWLNGKEYKCKVSNKALPAPIEKTISKAKGQPREPQVYTLPPSRDELTKNQVSLTCLVK
GFYPSDIAVEWESNGQPENNYKTIPPVLDSDGSFFLYSKLTVDKSRWQQGNVFSCSVMHEAL
HNHYTQKSLSLSPGGGGSGGGSAPTSSSTKKTQLQLEHLLHDLQMILNGINNYKNPKLTRML
TFKFYMPKKATELKHLQCLEEELKPLEEVLNLAQSKNFHLRPRDLISNINVIVLELKGSETT
FMCEYADETATIVEFLNRWITFIRSIISTLT
Tociluzimab-IL-2-variant-fusion-HC-14
(SEQ ID NO: 312)
QVQLQESGPGLVRPSQTLSLICTVSGYSITSDHAWSWVRQPPGRGLEWIGYISYSGITTYNP
SLKSRVTMLRDTSKNQFSLRLSSVTAADTAVYYCARSLARTTAMDYWGQGSLVTVSSASTKG
PSVFPLAPSSKSTSGGTAALGCLVKDYFPEPVTVSWNSGALTSGVHTFPAVLQSSGLYSLSS
VVTVPSSSLGTQTYICNVNHKPSNTKVDKKVEPKSCDKTHTCPPCPAPEAAGAPSVFLFPPK
PKDTLMISRTPEVTCVVVDVSHEDPEVKFNWYVDGVEVHNAKTKPREEQYNSTYRVVSVLTV
LHQDWLNGKEYKCKVSNKALPAPIEKTISKAKGQPREPQVYTLPPSRDELTKNQVSLTCLVK
GFYPSDIAVEWESNGQPENNYKTIPPVLDSDGSFFLYSKLTVDKSRWQQGNVFSCSVMHEAL
HNHYTQKSLSLSPGGGGSGGGSAPTSSSTKKTQLQLEHLLHDLQMILNGINNYKNPKLTRML
TFKFYMPKKATELKHLQCLEEELKPLEEVLNLAQSKNFHLRPRDLISNINVIVLELKGSETT
FMCEYADETATIVEFLNRWITFISSIISTLT
TACI extracellular domain
(SEQ ID NO: 313)
MSGLGRSRRGGRSRVDQEERFPQGLWTGVAMRSCPEEQYWDPLLGTCMSCKTICNHQSQRTC
AAFCRSLSCRKEQGKFYDHLLRDCISCASICGQHPKQCAYFCENKLRSPVNLPPELRRQRSG
EVENNSDNSGRYQGLEHRGSEASPALPGLKLSADQVALVYS
TACI functional fragment (ECD amino acid 30-110)
(SEQ ID NO: 314)
AMRSCPEEQYWDPLLGTCMSCKTICNHQSQRTCAAFCRSLSCRKEQGKFYDHLLRDCISCAS
ICGQHPKQCAYFCENKLRS
IL-2 variant TACI bifunctional fusion protein 1
(SEQ ID NO: 315)
AMRSCPEEQYWDPLLGTCMSCKTICNHQSQRTCAAFCRSLSCRKEQGKFYDHLLRDCISCAS
ICGQHPKQCAYFCENKLRSEPKSSDKTHTCPPCPAPEAAGAPSVFLFPPKPKDTLMISRTPE
VTCVVVDVSHEDPEVKFNWYVDGVEVHNAKTKPREEQYNSTYRVVSVLTVLHQDWLNGKEYK
CKVSNKALPAPIEKTISKAKGQPREPQVYTLPPSRDELTKNQVSLTCLVKGFYPSDIAVEWE
SNGQPENNYKTTPPVLDSDGSFFLYSKLTVDKSRWQQGNVFSCSVMHEALHNHYTQKSLSLS
PGGGGSGGGGSAPTSSSTKKTQLQLEHLLHDLQMILNGINNYKNPKLTRMLTFKFYMPKKAT
ELKHLQCLEEELKPLEEVLNLAQSKNFHLRPRDLISNINVIVLELKGSETTFMCEYADETAT
IVEFLNRWITFIDSIISTLT
IL-2 variant TACI bifunctional fusion protein 2
(SEQ ID NO: 316)
AMRSCPEEQYWDPLLGTCMSCKTICNHQSQRTCAAFCRSLSCRKEQGKFYDHLLRDCISCAS
ICGQHPKQCAYFCENKLRSEPKSSDKTHTCPPCPAPEAAGAPSVFLFPPKPKDTLMISRTPE
VTCVVVDVSHEDPEVKFNWYVDGVEVHNAKTKPREEQYNSTYRVVSVLTVLHQDWLNGKEYK
CKVSNKALPAPIEKTISKAKGQPREPQVYTLPPSRDELTKNQVSLTCLVKGFYPSDIAVEWE
SNGQPENNYKTTPPVLDSDGSFFLYSKLTVDKSRWQQGNVFSCSVMHEALHNHYTQKSLSLS
PGGGGSGGGGSAPTSSSTKKTQLQLEHLLNDLQMILNGINNYKNPKLTRMLTFKFYMPKKAT
ELKHLQCLEEELKPLEEVLNLAQSKNFHLRPRDLISNINVIVLELKGSETTFMCEYADETAT
IVEFLNRWITFIESIISTLT
IL-2 variant TACI bifunctional fusion protein 3
(SEQ ID NO: 317)
AMRSCPEEQYWDPLLGTCMSCKTICNHQSQRTCAAFCRSLSCRKEQGKFYDHLLRDCISCAS
ICGQHPKQCAYFCENKLRSEPKSSDKTHTCPPCPAPEAAGAPSVFLFPPKPKDTLMISRTPE
VTCVVVDVSHEDPEVKFNWYVDGVEVHNAKTKPREEQYNSTYRVVSVLTVLHQDWLNGKEYK
CKVSNKALPAPIEKTISKAKGQPREPQVYTLPPSRDELTKNQVSLTCLVKGFYPSDIAVEWE
SNGQPENNYKTTPPVLDSDGSFFLYSKLTVDKSRWQQGNVFSCSVMHEALHNHYTQKSLSLS
PGGGGSGGGGSAPTSSSTKKTQLQLEHLLRDLQMILNGINNYKNPKLTRMLTFKFYMPKKAT
ELKHLQCLEEELKPLEEVLNLAQSKNFHLRPRDLISNINVIVLELKGSETTFMCEYADETAT
IVEFLNRWITFIESIISTLT
IL-2 variant TACI bifunctional fusion protein 4
(SEQ ID NO: 318)
AMRSCPEEQYWDPLLGTCMSCKTICNHQSQRTCAAFCRSLSCRKEQGKFYDHLLRDCISCAS
ICGQHPKQCAYFCENKLRSEPKSSDKTHTCPPCPAPEAAGAPSVFLFPPKPKDTLMISRTPE
VTCVVVDVSHEDPEVKFNWYVDGVEVHNAKTKPREEQYNSTYRVVSVLTVLHQDWLNGKEYK
CKVSNKALPAPIEKTISKAKGQPREPQVYTLPPSRDELTKNQVSLTCLVKGFYPSDIAVEWE
SNGQPENNYKTTPPVLDSDGSFFLYSKLTVDKSRWQQGNVFSCSVMHEALHNHYTQKSLSLS
PGGGGSGGGGSAPTSSSTKKTQLQLEHLLDDLQMILNGINNYKNPKLTRMLTFKFYMPKKAT
ELKHLQCLEEELKPLEEVLNLAQSKNFHLRPRDLISNINVIVLELKGSETTFMCEYADETAT
IVEFLNRWITFIESIISTLT
IL-2 variant TACI bifunctional fusion protein 5
(SEQ ID NO: 319)
AMRSCPEEQYWDPLLGTCMSCKTICNHQSQRTCAAFCRSLSCRKEQGKFYDHLLRDCISCAS
ICGQHPKQCAYFCENKLRSEPKSSDKTHTCPPCPAPEAAGAPSVFLFPPKPKDTLMISRTPE
VTCVVVDVSHEDPEVKFNWYVDGVEVHNAKTKPREEQYNSTYRVVSVLTVLHQDWLNGKEYK
CKVSNKALPAPIEKTISKAKGQPREPQVYTLPPSRDELTKNQVSLTCLVKGFYPSDIAVEWE
SNGQPENNYKTTPPVLDSDGSFFLYSKLTVDKSRWQQGNVFSCSVMHEALHNHYTQKSLSLS
PGGGGSGGGGSAPTSSSTKKTQLQLEHLLLQLQMILNGINNYKNPKLTRMLTFKFYMPKKAT
ELKHLQCLEEELKPLEEVLNLAQSKNFHLRPRDLISNINVIVLELKGSETTFMCEYADETAT
IVEFLNRWITFIESIISTLT
IL-2 variant TACI bifunctional fusion protein 6
(SEQ ID NO: 320)
AMRSCPEEQYWDPLLGTCMSCKTICNHQSQRTCAAFCRSLSCRKEQGKFYDHLLRDCISCAS
ICGQHPKQCAYFCENKLRSEPKSSDKTHTCPPCPAPEAAGAPSVFLFPPKPKDTLMISRTPE
VTCVVVDVSHEDPEVKFNWYVDGVEVHNAKTKPREEQYNSTYRVVSVLTVLHQDWLNGKEYK
CKVSNKALPAPIEKTISKAKGQPREPQVYTLPPSRDELTKNQVSLTCLVKGFYPSDIAVEWE
SNGQPENNYKTTPPVLDSDGSFFLYSKLTVDKSRWQQGNVFSCSVMHEALHNHYTQKSLSLS
PGGGGSGGGGSTQLQLEHLLHDLQMILNGINNYKNPKLTRMLTFKFYMPKKATELKHLQCLE
EELKPLEEVLNLAQSKNFHLRPRDLISNINVIVLELKGSETTFMCEYADETATIVEFLNRWI
TFIESIISTLT

The application's sequence listing, which the Patent Office published only in electronic form, follows.

SEQUENCE LISTING (320 sequences)

SEQ ID NO: 1 - protein, 153 aa, Homo sapiens
MYRMQLLSCIALSLALVTNSAPTSSSTKKTQLQLEHLLLDLQMILNGINNYKNPKLTRMLTFKFYMPKKATELKHLQCLEEELKPLEEVLNLAQSKNFHLRPRDLISNINVIVLELKGSETTFMCEYADETATIVEFLNRWITFCQSIISTLT

SEQ ID NO: 2 - protein, 133 aa, Homo sapiens [sequence omitted]

SEQ ID NO: 3 - protein, 133 aa, Homo sapiens
APTSSSTKKTQLQLEHLLLDLQMILNGINNYKNPKLTRMLTFKFYMPKKATELKHLQCLEEELKPLEEVLNLAQSKNFHLRPRDLISNINVIVLELKGSETTFMCEYADETATIVEFLNRWITFSQSIISTLT

SEQ ID NO: 4 - protein, 133 aa, Artificial
  IL-2 N88R variant sequence
APTSSSTKKTQLQLEHLLLDLQMILNGINNYKNPKLTRMLTFKFYMPKKATELKHLQCLEEELKPLEEVLNLAQSKNFHLRPRDLISRINVIVLELKGSETTFMCEYADETATIVEFLNRWITFSQSIISTLT

SEQ ID NO: 5 - protein, 133 aa, Artificial
  IL-2 D20T variant sequence
APTSSSTKKTQLQLEHLLLTLQMILNGINNYKNPKLTRMLTFKFYMPKKATELKHLQCLEEELKPLEEVLNLAQSKNFHLRPRDLISNINVIVLELKGSETTFMCEYADETATIVEFLNRWITFSQSIISTLT

SEQ ID NO: 6 - protein, 133 aa, Artificial
  IL-2 D20E variant sequence
APTSSSTKKTQLQLEHLLLELQMILNGINNYKNPKLTRMLTFKFYMPKKATELKHLQCLEEELKPLEEVLNLAQSKNFHLRPRDLISNINVIVLELKGSETTFMCEYADETATIVEFLNRWITFSQSIISTLT

SEQ ID NO: 7 - protein, 133 aa, Artificial
  IL-2 D20N variant sequence
APTSSSTKKTQLQLEHLLLNLQMILNGINNYKNPKLTRMLTFKFYMPKKATELKHLQCLEEELKPLEEVLNLAQSKNFHLRPRDLISNINVIVLELKGSETTFMCEYADETATIVEFLNRWITFSQSIISTLT

SEQ ID NO: 8 - protein, 133 aa, Artificial
  IL-2 D20Q variant sequence
APTSSSTKKTQLQLEHLLLQLQMILNGINNYKNPKLTRMLTFKFYMPKKATELKHLQCLEEELKPLEEVLNLAQSKNFHLRPRDLISNINVIVLELKGSETTFMCEYADETATIVEFLNRWITFSQSIISTLT

SEQ ID NO: 9 - protein, 133 aa, Artificial
  IL-2 D20S variant sequence
APTSSSTKKTQLQLEHLLLSLQMILNGINNYKNPKLTRMLTFKFYMPKKATELKHLQCLEEELKPLEEVLNLAQSKNFHLRPRDLISNINVIVLELKGSETTFMCEYADETATIVEFLNRWITFSQSIISTLT

SEQ ID NO: 10 - protein, 133 aa, Artificial
  IL-2 D20Y variant sequence
APTSSSTKKTQLQLEHLLLYLQMILNGINNYKNPKLTRMLTFKFYMPKKATELKHLQCLEEELKPLEEVLNLAQSKNFHLRPRDLISNINVIVLELKGSETTFMCEYADETATIVEFLNRWITFSQSIISTLT

SEQ ID NO: 11 - protein, 133 aa, Artificial
  IL-2 D20I variant sequence
APTSSSTKKTQLQLEHLLLILQMILNGINNYKNPKLTRMLTFKFYMPKKATELKHLQCLEEELKPLEEVLNLAQSKNFHLRPRDLISNINVIVLELKGSETTFMCEYADETATIVEFLNRWITFSQSIISTLT

SEQ ID NO: 12 - protein, 133 aa, Artificial
  IL-2 L19Y variant sequence
APTSSSTKKTQLQLEHLLYDLQMILNGINNYKNPKLTRMLTFKFYMPKKATELKHLQCLEEELKPLEEVLNLAQSKNFHLRPRDLISNINVIVLELKGSETTFMCEYADETATIVEFLNRWITFSQSIISTLT

SEQ ID NO: 13 - protein, 133 aa, Artificial
  IL-2 L19N variant sequence
APTSSSTKKTQLQLEHLLNDLQMILNGINNYKNPKLTRMLTFKFYMPKKATELKHLQCLEEELKPLEEVLNLAQSKNFHLRPRDLISNINVIVLELKGSETTFMCEYADETATIVEFLNRWITFSQSIISTLT

SEQ ID NO: 14 - protein, 133 aa, Artificial
  IL-2 L19R variant sequence
APTSSSTKKTQLQLEHLLRDLQMILNGINNYKNPKLTRMLTFKFYMPKKATELKHLQCLEEELKPLEEVLNLAQSKNFHLRPRDLISNINVIVLELKGSETTFMCEYADETATIVEFLNRWITFSQSIISTLT

SEQ ID NO: 15 - protein, 133 aa, Artificial
  IL-2 N88G variant sequence
APTSSSTKKTQLQLEHLLLDLQMILNGINNYKNPKLTRMLTFKFYMPKKATELKHLQCLEEELKPLEEVLNLAQSKNFHLRPRDLISGINVIVLELKGSETTFMCEYADETATIVEFLNRWITFSQSIISTLT

SEQ ID NO: 16 - protein, 133 aa, Artificial
  IL-2 N88I variant sequence
APTSSSTKKTQLQLEHLLLDLQMILNGINNYKNPKLTRMLTFKFYMPKKATELKHLQCLEEELKPLEEVLNLAQSKNFHLRPRDLISIINVIVLELKGSETTFMCEYADETATIVEFLNRWITFSQSIISTLT

SEQ ID NO: 17 - protein, 133 aa, Artificial
  IL-2 N88Q variant sequence
APTSSSTKKTQLQLEHLLLDLQMILNGINNYKNPKLTRMLTFKFYMPKKATELKHLQCLEEELKPLEEVLNLAQSKNFHLRPRDLISQINVIVLELKGSETTFMCEYADETATIVEFLNRWITFSQSIISTLT

SEQ ID NO: 18 - protein, 133 aa, Artificial
  IL-2 N88E variant sequence
APTSSSTKKTQLQLEHLLLDLQMILNGINNYKNPKLTRMLTFKFYMPKKATELKHLQCLEEELKPLEEVLNLAQSKNFHLRPRDLISEINVIVLELKGSETTFMCEYADETATIVEFLNRWITFSQSIISTLT

SEQ ID NO: 19 - protein, 133 aa, Artificial
  IL-2 N88T variant sequence
APTSSSTKKTQLQLEHLLLDLQMILNGINNYKNPKLTRMLTFKFYMPKKATELKHLQCLEEELKPLEEVLNLAQSKNFHLRPRDLISTINVIVLELKGSETTFMCEYADETATIVEFLNRWITFSQSIISTLT

SEQ ID NO: 20 - protein, 133 aa, Artificial
  IL-2 N88M variant sequence
APTSSSTKKTQLQLEHLLLDLQMILNGINNYKNPKLTRMLTFKFYMPKKATELKHLQCLEEELKPLEEVLNLAQSKNFHLRPRDLISMINVIVLELKGSETTFMCEYADETATIVEFLNRWITFSQSIISTLT

SEQ ID NO: 21 - protein, 133 aa, Artificial
  IL-2 Q126E variant sequence
APTSSSTKKTQLQLEHLLLDLQMILNGINNYKNPKLTRMLTFKFYMPKKATELKHLQCLEEELKPLEEVLNLAQSKNFHLRPRDLISNINVIVLELKGSETTFMCEYADETATIVEFLNRWITFSESIISTLT

SEQ ID NO: 22 - protein, 133 aa, Artificial
  IL-2 Q126L variant sequence
APTSSSTKKTQLQLEHLLLDLQMILNGINNYKNPKLTRMLTFKFYMPKKATELKHLQCLEEELKPLEEVLNLAQSKNFHLRPRDLISNINVIVLELKGSETTFMCEYADETATIVEFLNRWITFSLSIISTLT

SEQ ID NO: 23 - protein, 133 aa, Artificial
  IL-2 Q126N variant sequence
APTSSSTKKTQLQLEHLLLDLQMILNGINNYKNPKLTRMLTFKFYMPKKATELKHLQCLEEELKPLEEVLNLAQSKNFHLRPRDLISNINVIVLELKGSETTFMCEYADETATIVEFLNRWITFSNSIISTLT

SEQ ID NO: 24 - protein, 133 aa, Artificial
  IL-2 Q126D variant sequence
APTSSSTKKTQLQLEHLLLDLQMILNGINNYKNPKLTRMLTFKFYMPKKATELKHLQCLEEELKPLEEVLNLAQSKNFHLRPRDLISNINVIVLELKGSETTFMCEYADETATIVEFLNRWITFSDSIISTLT

SEQ ID NO: 25 - protein, 133 aa, Artificial
  IL-2 Q126M variant sequence
APTSSSTKKTQLQLEHLLLDLQMILNGINNYKNPKLTRMLTFKFYMPKKATELKHLQCLEEELKPLEEVLNLAQSKNFHLRPRDLISNINVIVLELKGSETTFMCEYADETATIVEFLNRWITFSMSIISTLT

SEQ ID NO: 26 - protein, 133 aa, Artificial
  IL-2 D20I/N88G variant sequence
APTSSSTKKTQLQLEHLLLILQMILNGINNYKNPKLTRMLTFKFYMPKKATELKHLQCLEEELKPLEEVLNLAQSKNFHLRPRDLISGINVIVLELKGSETTFMCEYADETATIVEFLNRWITFSQSIISTLT

SEQ ID NO: 27 - protein, 133 aa, Artificial
  IL-2 D20I/N88R variant sequence
APTSSSTKKTQLQLEHLLLILQMILNGINNYKNPKLTRMLTFKFYMPKKATELKHLQCLEEELKPLEEVLNLAQSKNFHLRPRDLISRINVIVLELKGSETTFMCEYADETATIVEFLNRWITFSQSIISTLT

SEQ ID NO: 28 - protein, 133 aa, Artificial
  IL-2 D20T/N88R variant sequence
APTSSSTKKTQLQLEHLLLTLQMILNGINNYKNPKLTRMLTFKFYMPKKATELKHLQCLEEELKPLEEVLNLAQSKNFHLRPRDLISRINVIVLELKGSETTFMCEYADETATIVEFLNRWITFSQSIISTLT

SEQ ID NO: 29 - protein, 133 aa, Artificial
  IL-2 D20I/N88I variant sequence
APTSSSTKKTQLQLEHLLLILQMILNGINNYKNPKLTRMLTFKFYMPKKATELKHLQCLEEELKPLEEVLNLAQSKNFHLRPRDLISIINVIVLELKGSETTFMCEYADETATIVEFLNRWITFSQSIISTLT

SEQ ID NO: 30 - protein, 133 aa, Artificial
  IL-2 D20T/Q126E variant sequence
APTSSSTKKTQLQLEHLLLTLQMILNGINNYKNPKLTRMLTFKFYMPKKATELKHLQCLEEELKPLEEVLNLAQSKNFHLRPRDLISNINVIVLELKGSETTFMCEYADETATIVEFLNRWITFSESIISTLT

SEQ ID NO: 31 - protein, 133 aa, Artificial
  IL-2 D20T/N88R/Q126E variant sequence
APTSSSTKKTQLQLEHLLLTLQMILNGINNYKNPKLTRMLTFKFYMPKKATELKHLQCLEEELKPLEEVLNLAQSKNFHLRPRDLISRINVIVLELKGSETTFMCEYADETATIVEFLNRWITFSESIISTLT

SEQ ID NO: 32 - protein, 133 aa, Artificial
  IL-2 D20T/Q126L variant sequence
APTSSSTKKTQLQLEHLLLTLQMILNGINNYKNPKLTRMLTFKFYMPKKATELKHLQCLEEELKPLEEVLNLAQSKNFHLRPRDLISNINVIVLELKGSETTFMCEYADETATIVEFLNRWITFSLSIISTLT

SEQ ID NO: 33 - protein, 133 aa, Artificial
  IL-2 D20T/N88R/Q126L variant sequence
APTSSSTKKTQLQLEHLLLTLQMILNGINNYKNPKLTRMLTFKFYMPKKATELKHLQCLEEELKPLEEVLNLAQSKNFHLRPRDLISRINVIVLELKGSETTFMCEYADETATIVEFLNRWITFSLSIISTLT

SEQ ID NO: 34 - protein, 133 aa, Artificial
  IL-2 L19N/Q126E variant sequence
APTSSSTKKTQLQLEHLLNDLQMILNGINNYKNPKLTRMLTFKFYMPKKATELKHLQCLEEELKPLEEVLNLAQSKNFHLRPRDLISNINVIVLELKGSETTFMCEYADETATIVEFLNRWITFSESIISTLT

SEQ ID NO: 35 - protein, 133 aa, Artificial
  IL-2 L19R/Q126E variant sequence
APTSSSTKKTQLQLEHLLRDLQMILNGINNYKNPKLTRMLTFKFYMPKKATELKHLQCLEEELKPLEEVLNLAQSKNFHLRPRDLISNINVIVLELKGSETTFMCEYADETATIVEFLNRWITFSESIISTLT

SEQ ID NO: 36 - protein, 133 aa, Artificial
  IL-2 L19Y/Q126E variant sequence
APTSSSTKKTQLQLEHLLYDLQMILNGINNYKNPKLTRMLTFKFYMPKKATELKHLQCLEEELKPLEEVLNLAQSKNFHLRPRDLISNINVIVLELKGSETTFMCEYADETATIVEFLNRWITFSESIISTLT

SEQ ID NO: 37 - protein, 133 aa, Artificial
  IL-2 L19Q variant sequence
APTSSSTKKTQLQLEHLLQDLQMILNGINNYKNPKLTRMLTFKFYMPKKATELKHLQCLEEELKPLEEVLNLAQSKNFHLRPRDLISNINVIVLELKGSETTFMCEYADETATIVEFLNRWITFSQSIISTLT

SEQ ID NO: 38 - protein, 133 aa, Artificial
  IL-2 L19H variant sequence
APTSSSTKKTQLQLEHLLHDLQMILNGINNYKNPKLTRMLTFKFYMPKKATELKHLQCLEEELKPLEEVLNLAQSKNFHLRPRDLISNINVIVLELKGSETTFMCEYADETATIVEFLNRWITFSQSIISTLT

SEQ ID NO: 39 - protein, 133 aa, Artificial
  IL-2 L19D variant sequence
APTSSSTKKTQLQLEHLLDDLQMILNGINNYKNPKLTRMLTFKFYMPKKATELKHLQCLEEELKPLEEVLNLAQSKNFHLRPRDLISNINVIVLELKGSETTFMCEYADETATIVEFLNRWITFSQSIISTLT

SEQ ID NO: 40 - protein, 133 aa, Artificial
  IL-2 L19P variant sequence
APTSSSTKKTQLQLEHLLPDLQMILNGINNYKNPKLTRMLTFKFYMPKKATELKHLQCLEEELKPLEEVLNLAQSKNFHLRPRDLISNINVIVLELKGSETTFMCEYADETATIVEFLNRWITFSQSIISTLT

SEQ ID NO: 41 - protein, 133 aa, Artificial
  IL-2 D20T/S125I/Q126K variant sequence
APTSSSTKKTQLQLEHLLLTLQMILNGINNYKNPKLTRMLTFKFYMPKKATELKHLQCLEEELKPLEEVLNLAQSKNFHLRPRDLISNINVIVLELKGSETTFMCEYADETATIVEFLNRWITFIKSIISTLT

SEQ ID NO: 42 - protein, 133 aa, Artificial
  IL-2 L19N/S125I/Q126K variant sequence
APTSSSTKKTQLQLEHLLNDLQMILNGINNYKNPKLTRMLTFKFYMPKKATELKHLQCLEEELKPLEEVLNLAQSKNFHLRPRDLISNINVIVLELKGSETTFMCEYADETATIVEFLNRWITFIKSIISTLT

SEQ ID NO: 43 - protein, 133 aa, Artificial
  IL-2 L19R/S125I/Q126K variant sequence
APTSSSTKKTQLQLEHLLRDLQMILNGINNYKNPKLTRMLTFKFYMPKKATELKHLQCLEEELKPLEEVLNLAQSKNFHLRPRDLISNINVIVLELKGSETTFMCEYADETATIVEFLNRWITFIKSIISTLT

SEQ ID NO: 44 - protein, 226 aa, Artificial
  Human IgG1-Fc
DKTHTCPPCPAPELLGGPSVFLFPPKPKDTLMISRTPEVTCVVVDVSHEDPEVKFNWYVDGVEVHNAKTKPREEQYNSTYRVVSVLTVLHQDWLNGKEYKCKVSNKALPAPIEKTISKAKGQPREPQVYTLPPSRDELTKNQVSLTCLVKGFYPSDIAVEWESNGQPENNYKTTPPVLDSDGSFFLYSKLTVDKSRWQQGNVFSCSVMHEALHNHYTQKSLSLSPG

SEQ ID NO: 45 - protein, 226 aa, Artificial
  Human IgG1-Fc with reduced/abolished effector function
DKTHTCPPCPAPEAAGAPSVFLFPPKPKDTLMISRTPEVTCVVVDVSHEDPEVKFNWYVDGVEVHNAKTKPREEQYNSTYRVVSVLTVLHQDWLNGKEYKCKVSNKALPAPIEKTISKAKGQPREPQVYTLPPSRDELTKNQVSLTCLVKGFYPSDIAVEWESNGQPENNYKTTPPVLDSDGSFFLYSKLTVDKSRWQQGNVFSCSVMHEALHNHYTQKSLSLSPG

SEQ ID NO: 46 - protein, 226 aa, Artificial
  Knob-Fc
DKTHTCPPCPAPEAAGAPSVFLFPPKPKDTLMISRTPEVTCVVVDVSHEDPEVKFNWYVDGVEVHNAKTKPREEQYNSTYRVVSVLTVLHQDWLNGKEYKCKVSNKALPAPIEKTISKAKGQPREPQVCTLPPSREEMTKNQVSLWCLVKGFYPSDIAVEWESNGQPENNYKTTPPVLDSDGSFFLYSKLTVDKSRWQQGNVFSCSVMHEALHNHYTQKSLSLSPG

SEQ ID NO: 47 - protein, 226 aa, Artificial
  Hole-Fc
DKTHTCPPCPAPEAAGAPSVFLFPPKPKDTLMISRTPEVTCVVVDVSHEDPEVKFNWYVDGVEVHNAKTKPREEQYNSTYRVVSVLTVLHQDWLNGKEYKCKVSNKALPAPIEKTISKAKGQPREPQVYTLPPCREEMTKNQVSLSCAVKGFYPSDIAVEWESNGQPENNYKTTPPVLDSDGSFFLVSKLTVDKSRWQQGNVFSCSVMHEALHNHYTQKSLSLSPG

SEQ ID NO: 48 - protein, 12 aa, Artificial
  Peptide linker
GGGSGGGSGGGS

SEQ ID NO: 49 - protein, 4 aa, Artificial
  Peptide linker
GGGS

SEQ ID NO: 50 - protein, 13 aa, Artificial
  Peptide linker
GSSGGSGGSGGSG

SEQ ID NO: 51 - protein, 5 aa, Artificial
  Peptide linker
GSSGT

SEQ ID NO: 52 - protein, 14 aa, Artificial
  Peptide linker
GGGGSGGGGSGGGS

SEQ ID NO: 53 - protein, 17 aa, Artificial
  Peptide linker
AEAAAKEAAAKEAAAKA

SEQ ID NO: 54 - protein, 20 aa, Artificial
  Peptide linker
GGGGSGGGGSGGGGSGGGGS

SEQ ID NO: 55 - protein, 8 aa, Artificial
  Peptide linker
GGGSGGGS

SEQ ID NO: 56 - protein, 5 aa, Artificial
  Peptide linker
GSGST

SEQ ID NO: 57 - protein, 4 aa, Artificial
  Peptide linker
GGSS

SEQ ID NO: 58 - protein, 5 aa, Artificial
  Peptide linker
GGGGS

SEQ ID NO: 59 - protein, 4 aa, Artificial
  Peptide linker
GGSG

SEQ ID NO: 60 - protein, 4 aa, Artificial
  Peptide linker
SGGG

SEQ ID NO: 61 - protein, 4 aa, Artificial
  Peptide linker
GSGS

SEQ ID NO: 62 - protein, 6 aa, Artificial
  Peptide linker
GSGSGS

SEQ ID NO: 63 - protein, 8 aa, Artificial
  Peptide linker
GSGSGSGS

SEQ ID NO: 64 - protein, 10 aa, Artificial
  Peptide linker
GSGSGSGSGS

SEQ ID NO: 65 - protein, 12 aa, Artificial
  Peptide linker
GSGSGSGSGSGS

SEQ ID NO: 66 - protein, 10 aa, Artificial
  Peptide linker
GGGGSGGGGS

SEQ ID NO: 67 - protein, 15 aa, Artificial
  Peptide linker
GGGGSGGGGSGGGGS

SEQ ID NO: 68 - protein, 165 aa, Artificial
  Human IL-2R? sushi domains sequence
ELCDDDPPEIPHATFKAMAYKEGTMLNCECKRGFRRIKSGSLYMLCTGNSSHSSWDNQCQCTSSATRNTTKQVTPQPEEQKERKTTEMQSPMQPVDQASLPGHCREPPPWENEATERIYHFVVGQMVYYQCVQGYRALHRGPAESVCKMTHGKTRWTQPQLICTG

SEQ ID NO: 69 - protein, 554 aa, Artificial
  P-0327
DKTHTCPPCPAPEAAGAPSVFLFPPKPKDTLMISRTPEVTCVVVDVSHEDPEVKFNWYVDGVEVHNAKTKPREEQYNSTYRVVSVLTVLHQDWLNGKEYKCKVSNKALPAPIEKTISKAKGQPREPQVYTLPPSRDELTKNQVSLTCLVKGFYPSDIAVEWESNGQPENNYKTTPPVLDSDGSFFLYSKLTVDKSRWQQGNVFSCSVMHEALHNHYTQKSLSLSPGGGGGSGGGGSGGGGSELCDDDPPEIPHATFKAMAYKEGTMLNCECKRGFRRIKSGSLYMLCTGNSSHSSWDNQCQCTSSATRNTTKQVTPQPEEQKERKTTEMQSPMQPVDQASLPGHCREPPPWENEATERIYHFVVGQMVYYQCVQGYRALHRGPAESVCKMTHGKTRWTQPQLICTGGGGGSGGGGSGGGGSAPTSSSTKKTQLQLEHLLLDLQMILNGINNYKNPKLTRMLTFKFYMPKKATELKHLQCLEEELKPLEEVLNLAQSKNFHLRPRDLISNINVIVLELKGSETTFMCEYADETATIVEFLNRWITFSQSIISTLT

SEQ ID NO: 70 - protein, 558 aa, Artificial
  P-0422
APTSSSTKKTQLQLEHLLLDLQMILNGINNYKNPKLTRMLTFKFYMPKKATELKHLQCLEEELKPLEEVLNLAQSKNFHLRPRDLISNINVIVLELKGSETTFMCEYADETATIVEFLNRWITFSQSIISTLTGGGGSGGGGSGGGGSELCDDDPPEIPHATFKAMAYKEGTMLNCECKRGFRRIKSGSLYMLCTGNSSHSSWDNQCQCTSSATRNTTKQVTPQPEEQKERKTTEMQSPMQPVDQASLPGHCREPPPWENEATERIYHFVVGQMVYYQCVQGYRALHRGPAESVCKMTHGKTRWTQPQLICTGGGGSGGGGSGGGGSCPPCPAPEAAGAPSVFLFPPKPKDTLMISRTPEVTCVVVDVSHEDPEVKFNWYVDGVEVHNAKTKPREEQYNSTYRVVSVLTVLHQDWLNGKEYKCKVSNKALPAPIEKTISKAKGQPREPQVYTLPPSRDELTKNQVSLTCLVKGFYPSDIAVEWESNGQPENNYKTTPPVLDSDGSFFLYSKLTVDKSRWQQGNVFSCSVMHEALHNHYTQKSLSLSPGGGGGSGGGGS

SEQ ID NO: 71 - protein, 367 aa, Artificial
  P-0250
DKTHTCPPCPAPEAAGAPSVFLFPPKPKDTLMISRTPEVTCVVVDVSHEDPEVKFNWYVDGVEVHNAKTKPREEQYNSTYRVVSVLTVLHQDWLNGKEYKCKVSNKALPAPIEKTISKAKGQPREPQVYTLPPSRDELTKNQVSLTCLVKGFYPSDIAVEWESNGQPENNYKTTPPVLDSDGSFFLYSKLTVDKSRWQQGNVFSCSVMHEALHNHYTQKSLSLSPGGGGSGGGSAPTSSSTKKTQLQLEHLLLDLQMILNGINNYKNPKLTRMLTFKFYMPKKATELKHLQCLEEELKPLEEVLNLAQSKNFHLRPRDLISNINVIVLELKGSETTFMCEYADETATIVEFLNRWITFSQSIISTLT

SEQ ID NO: 72 - protein, 371 aa, Artificial
  P-0305
APTSSSTKKTQLQLEHLLLDLQMILNGINNYKNPKLTRMLTFKFYMPKKATELKHLQCLEEELKPLEEVLNLAQSKNFHLRPRDLISNINVIVLELKGSETTFMCEYADETATIVEFLNRWITFSQSIISTLTAEAAAKEAAAKEAAAKACPPCPAPEAAGAPSVFLFPPKPKDTLMISRTPEVTCVVVDVSHEDPEVKFNWYVDGVEVHNAKTKPREEQYNSTYRVVSVLTVLHQDWLNGKEYKCKVSNKALPAPIEKTISKAKGQPREPQVYTLPPSRDELTKNQVSLTCLVKGFYPSDIAVEWESNGQPENNYKTTPPVLDSDGSFFLYSKLTVDKSRWQQGNVFSCSVMHEALHNHYTQKSLSLSPG

SEQ ID NO: 73 - protein, 367 aa, Artificial
  P-0254
DKTHTCPPCPAPEAAGAPSVFLFPPKPKDTLMISRTPEVTCVVVDVSHEDPEVKFNWYVDGVEVHNAKTKPREEQYNSTYRVVSVLTVLHQDWLNGKEYKCKVSNKALPAPIEKTISKAKGQPREPQVYTLPPSRDELTKNQVSLTCLVKGFYPSDIAVEWESNGQPENNYKTTPPVLDSDGSFFLYSKLTVDKSRWQQGNVFSCSVMHEALHNHYTQKSLSLSPGGGGSGGGSAPTSSSTKKTQLQLEHLLLDLQMILNGINNYKNPKLTRMLTFKFYMPKKATELKHLQCLEEELKPLEEVLNLAQSKNFHLRPRDLISRINVIVLELKGSETTFMCEYADETATIVEFLNRWITFSQSIISTLT

SEQ ID NO: 74 - protein, 367 aa, Artificial
  P-0363
DKTHTCPPCPAPEAAGAPSVFLFPPKPKDTLMISRTPEVTCVVVDVSHEDPEVKFNWYVDGVEVHNAKTKPREEQYNSTYRVVSVLTVLHQDWLNGKEYKCKVSNKALPAPIEKTISKAKGQPREPQVYTLPPSRDELTKNQVSLTCLVKGFYPSDIAVEWESNGQPENNYKTTPPVLDSDGSFFLYSKLTVDKSRWQQGNVFSCSVMHEALHNHYTQKSLSLSPGGGGSGGGSAPTSSSTKKTQLQLEHLLLTLQMILNGINNYKNPKLTRMLTFKFYMPKKATELKHLQCLEEELKPLEEVLNLAQSKNFHLRPRDLISNINVIVLELKGSETTFMCEYADETATIVEFLNRWITFSQSIISTLT

SEQ ID NO: 75 - protein, 367 aa, Artificial
  P-0364
DKTHTCPPCPAPEAAGAPSVFLFPPKPKDTLMISRTPEVTCVVVDVSHEDPEVKFNWYVDGVEVHNAKTKPREEQYNSTYRVVSVLTVLHQDWLNGKEYKCKVSNKALPAPIEKTISKAKGQPREPQVYTLPPSRDELTKNQVSLTCLVKGFYPSDIAVEWESNGQPENNYKTTPPVLDSDGSFFLYSKLTVDKSRWQQGNVFSCSVMHEALHNHYTQKSLSLSPGGGGSGGGSAPTSSSTKKTQLQLEHLLLELQMILNGINNYKNPKLTRMLTFKFYMPKKATELKHLQCLEEELKPLEEVLNLAQSKNFHLRPRDLISNINVIVLELKGSETTFMCEYADETATIVEFLNRWITFSQSIISTLT

SEQ ID NO: 76 - protein, 367 aa, Artificial
  P-0365
DKTHTCPPCPAPEAAGAPSVFLFPPKPKDTLMISRTPEVTCVVVDVSHEDPEVKFNWYVDGVEVHNAKTKPREEQYNSTYRVVSVLTVLHQDWLNGKEYKCKVSNKALPAPIEKTISKAKGQPREPQVYTLPPSRDELTKNQVSLTCLVKGFYPSDIAVEWESNGQPENNYKTTPPVLDSDGSFFLYSKLTVDKSRWQQGNVFSCSVMHEALHNHYTQKSLSLSPGGGGSGGGSAPTSSSTKKTQLQLEHLLLNLQMILNGINNYKNPKLTRMLTFKFYMPKKATELKHLQCLEEELKPLEEVLNLAQSKNFHLRPRDLISNINVIVLELKGSETTFMCEYADETATIVEFLNRWITFSQSIISTLT

SEQ ID NO: 77 - protein, 367 aa, Artificial
  P-0366
DKTHTCPPCPAPEAAGAPSVFLFPPKPKDTLMISRTPEVTCVVVDVSHEDPEVKFNWYVDGVEVHNAKTKPREEQYNSTYRVVSVLTVLHQDWLNGKEYKCKVSNKALPAPIEKTISKAKGQPREPQVYTLPPSRDELTKNQVSLTCLVKGFYPSDIAVEWESNGQPENNYKTTPPVLDSDGSFFLYSKLTVDKSRWQQGNVFSCSVMHEALHNHYTQKSLSLSPGGGGSGGGSAPTSSSTKKTQLQLEHLLLQLQMILNGINNYKNPKLTRMLTFKFYMPKKATELKHLQCLEEELKPLEEVLNLAQSKNFHLRPRDLISNINVIVLELKGSETTFMCEYADETATIVEFLNRWITFSQSIISTLT

SEQ ID NO: 78 - protein, 367 aa, Artificial
  P-0367
DKTHTCPPCPAPEAAGAPSVFLFPPKPKDTLMISRTPEVTCVVVDVSHEDPEVKFNWYVDGVEVHNAKTKPREEQYNSTYRVVSVLTVLHQDWLNGKEYKCKVSNKALPAPIEKTISKAKGQPREPQVYTLPPSRDELTKNQVSLTCLVKGFYPSDIAVEWESNGQPENNYKTTPPVLDSDGSFFLYSKLTVDKSRWQQGNVFSCSVMHEALHNHYTQKSLSLSPGGGGSGGGSAPTSSSTKKTQLQLEHLLLSLQMILNGINNYKNPKLTRMLTFKFYMPKKATELKHLQCLEEELKPLEEVLNLAQSKNFHLRPRDLISNINVIVLELKGSETTFMCEYADETATIVEFLNRWITFSQSIISTLT

SEQ ID NO: 79 - protein, 367 aa, Artificial
  P-0368
DKTHTCPPCPAPEAAGAPSVFLFPPKPKDTLMISRTPEVTCVVVDVSHEDPEVKFNWYVDGVEVHNAKTKPREEQYNSTYRVVSVLTVLHQDWLNGKEYKCKVSNKALPAPIEKTISKAKGQPREPQVYTLPPSRDELTKNQVSLTCLVKGFYPSDIAVEWESNGQPENNYKTTPPVLDSDGSFFLYSKLTVDKSRWQQGNVFSCSVMHEALHNHYTQKSLSLSPGGGGSGGGSAPTSSSTKKTQLQLEHLLLYLQMILNGINNYKNPKLTRMLTFKFYMPKKATELKHLQCLEEELKPLEEVLNLAQSKNFHLRPRDLISNINVIVLELKGSETTFMCEYADETATIVEFLNRWITFSQSIISTLT

SEQ ID NO: 80 - protein, 367 aa, Artificial
  P-0252
DKTHTCPPCPAPEAAGAPSVFLFPPKPKDTLMISRTPEVTCVVVDVSHEDPEVKFNWYVDGVEVHNAKTKPREEQYNSTYRVVSVLTVLHQDWLNGKEYKCKVSNKALPAPIEKTISKAKGQPREPQVYTLPPSRDELTKNQVSLTCLVKGFYPSDIAVEWESNGQPENNYKTTPPVLDSDGSFFLYSKLTVDKSRWQQGNVFSCSVMHEALHNHYTQKSLSLSPGGGGSGGGSAPTSSSTKKTQLQLEHLLLILQMILNGINNYKNPKLTRMLTFKFYMPKKATELKHLQCLEEELKPLEEVLNLAQSKNFHLRPRDLISNINVIVLELKGSETTFMCEYADETATIVEFLNRWITFSQSIISTLT

SEQ ID NO: 81 - protein, 367 aa, Artificial
  P-0372
DKTHTCPPCPAPEAAGAPSVFLFPPKPKDTLMISRTPEVTCVVVDVSHEDPEVKFNWYVDGVEVHNAKTKPREEQYNSTYRVVSVLTVLHQDWLNGKEYKCKVSNKALPAPIEKTISKAKGQPREPQVYTLPPSRDELTKNQVSLTCLVKGFYPSDIAVEWESNGQPENNYKTTPPVLDSDGSFFLYSKLTVDKSRWQQGNVFSCSVMHEALHNHYTQKSLSLSPGGGGSGGGSAPTSSSTKKTQLQLEHLLYDLQMILNGINNYKNPKLTRMLTFKFYMPKKATELKHLQCLEEELKPLEEVLNLAQSKNFHLRPRDLISNINVIVLELKGSETTFMCEYADETATIVEFLNRWITFSQSIISTLT

SEQ ID NO: 82 - protein, 367 aa, Artificial
  P-0373
DKTHTCPPCPAPEAAGAPSVFLFPPKPKDTLMISRTPEVTCVVVDVSHEDPEVKFNWYVDGVEVHNAKTKPREEQYNSTYRVVSVLTVLHQDWLNGKEYKCKVSNKALPAPIEKTISKAKGQPREPQVYTLPPSRDELTKNQVSLTCLVKGFYPSDIAVEWESNGQPENNYKTTPPVLDSDGSFFLYSKLTVDKSRWQQGNVFSCSVMHEALHNHYTQKSLSLSPGGGGSGGGSAPTSSSTKKTQLQLEHLLNDLQMILNGINNYKNPKLTRMLTFKFYMPKKATELKHLQCLEEELKPLEEVLNLAQSKNFHLRPRDLISNINVIVLELKGSETTFMCEYADETATIVEFLNRWITFSQSIISTLT

SEQ ID NO: 83 - protein, 367 aa, Artificial
  P-0374
DKTHTCPPCPAPEAAGAPSVFLFPPKPKDTLMISRTPEVTCVVVDVSHEDPEVKFNWYVDGVEVHNAKTKPREEQYNSTYRVVSVLTVLHQDWLNGKEYKCKVSNKALPAPIEKTISKAKGQPREPQVYTLPPSRDELTKNQVSLTCLVKGFYPSDIAVEWESNGQPENNYKTTPPVLDSDGSFFLYSKLTVDKSRWQQGNVFSCSVMHEALHNHYTQKSLSLSPGGGGSGGGSAPTSSSTKKTQLQLEHLLRDLQMILNGINNYKNPKLTRMLTFKFYMPKKATELKHLQCLEEELKPLEEVLNLAQSKNFHLRPRDLISNINVIVLELKGSETTFMCEYADETATIVEFLNRWITFSQSIISTLT

SEQ ID NO: 84 - protein, 367 aa, Artificial
  P-0253
DKTHTCPPCPAPEAAGAPSVFLFPPKPKDTLMISRTPEVTCVVVDVSHEDPEVKFNWYVDGVEVHNAKTKPREEQYNSTYRVVSVLTVLHQDWLNGKEYKCKVSNKALPAPIEKTISKAKGQPREPQVYTLPPSRDELTKNQVSLTCLVKGFYPSDIAVEWESNGQPENNYKTTPPVLDSDGSFFLYSKLTVDKSRWQQGNVFSCSVMHEALHNHYTQKSLSLSPGGGGSGGGSAPTSSSTKKTQLQLEHLLLDLQMILNGINNYKNPKLTRMLTFKFYMPKKATELKHLQCLEEELKPLEEVLNLAQSKNFHLRPRDLISGINVIVLELKGSETTFMCEYADETATIVEFLNRWITFSQSIISTLT

SEQ ID NO: 85 - protein, 367 aa, Artificial
  P-0302
DKTHTCPPCPAPEAAGAPSVFLFPPKPKDTLMISRTPEVTCVVVDVSHEDPEVKFNWYVDGVEVHNAKTKPREEQYNSTYRVVSVLTVLHQDWLNGKEYKCKVSNKALPAPIEKTISKAKGQPREPQVYTLPPSRDELTKNQVSLTCLVKGFYPSDIAVEWESNGQPENNYKTTPPVLDSDGSFFLYSKLTVDKSRWQQGNVFSCSVMHEALHNHYTQKSLSLSPGGGGSGGGSAPTSSSTKKTQLQLEHLLLDLQMILNGINNYKNPKLTRMLTFKFYMPKKATELKHLQCLEEELKPLEEVLNLAQSKNFHLRPRDLISIINVIVLELKGSETTFMCEYADETATIVEFLNRWITFSQSIISTLT

SEQ ID NO: 86 - protein, 367 aa, Artificial
  P-0375
DKTHTCPPCPAPEAAGAPSVFLFPPKPKDTLMISRTPEVTCVVVDVSHEDPEVKFNWYVDGVEVHNAKTKPREEQYNSTYRVVSVLTVLHQDWLNGKEYKCKVSNKALPAPIEKTISKAKGQPREPQVYTLPPSRDELTKNQVSLTCLVKGFYPSDIAVEWESNGQPENNYKTTPPVLDSDGSFFLYSKLTVDKSRWQQGNVFSCSVMHEALHNHYTQKSLSLSPGGGGSGGGSAPTSSSTKKTQLQLEHLLLDLQMILNGINNYKNPKLTRMLTFKFYMPKKATELKHLQCLEEELKPLEEVLNLAQSKNFHLRPRDLISQINVIVLELKGSETTFMCEYADETATIVEFLNRWITFSQSIISTLT

SEQ ID NO: 87 - protein, 367 aa, Artificial
  P-0376
DKTHTCPPCPAPEAAGAPSVFLFPPKPKDTLMISRTPEVTCVVVDVSHEDPEVKFNWYVDGVEVHNAKTKPREEQYNSTYRVVSVLTVLHQDWLNGKEYKCKVSNKALPAPIEKTISKAKGQPREPQVYTLPPSRDELTKNQVSLTCLVKGFYPSDIAVEWESNGQPENNYKTTPPVLDSDGSFFLYSKLTVDKSRWQQGNVFSCSVMHEALHNHYTQKSLSLSPGGGGSGGGSAPTSSSTKKTQLQLEHLLLDLQMILNGINNYKNPKLTRMLTFKFYMPKKATELKHLQCLEEELKPLEEVLNLAQSKNFHLRPRDLISEINVIVLELKGSETTFMCEYADETATIVEFLNRWITFSQSIISTLT

SEQ ID NO: 88 - protein, 367 aa, Artificial
  P-0377
DKTHTCPPCPAPEAAGAPSVFLFPPKPKDTLMISRTPEVTCVVVDVSHEDPEVKFNWYVDGVEVHNAKTKPREEQYNSTYRVVSVLTVLHQDWLNGKEYKCKVSNKALPAPIEKTISKAKGQPREPQVYTLPPSRDELTKNQVSLTCLVKGFYPSDIAVEWESNGQPENNYKTTPPVLDSDGSFFLYSKLTVDKSRWQQGNVFSCSVMHEALHNHYTQKSLSLSPGGGGSGGGSAPTSSSTKKTQLQLEHLLLDLQMILNGINNYKNPKLTRMLTFKFYMPKKATELKHLQCLEEELKPLEEVLNLAQSKNFHLRPRDLISTINVIVLELKGSETTFMCEYADETATIVEFLNRWITFSQSIISTLT

SEQ ID NO: 89 - protein, 367 aa, Artificial
  P-0378
DKTHTCPPCPAPEAAGAPSVFLFPPKPKDTLMISRTPEVTCVVVDVSHEDPEVKFNWYVDGVEVHNAKTKPREEQYNSTYRVVSVLTVLHQDWLNGKEYKCKVSNKALPAPIEKTISKAKGQPREPQVYTLPPSRDELTKNQVSLTCLVKGFYPSDIAVEWESNGQPENNYKTTPPVLDSDGSFFLYSKLTVDKSRWQQGNVFSCSVMHEALHNHYTQKSLSLSPGGGGSGGGSAPTSSSTKKTQLQLEHLLLDLQMILNGINNYKNPKLTRMLTFKFYMPKKATELKHLQCLEEELKPLEEVLNLAQSKNFHLRPRDLISMINVIVLELKGSETTFMCEYADETATIVEFLNRWITFSQSIISTLT

SEQ ID NO: 90 - protein, 367 aa, Artificial
  P-0303
DKTHTCPPCPAPEAAGAPSVFLFPPKPKDTLMISRTPEVTCVVVDVSHEDPEVKFNWYVDGVEVHNAKTKPREEQYNSTYRVVSVLTVLHQDWLNGKEYKCKVSNKALPAPIEKTISKAKGQPREPQVYTLPPSRDELTKNQVSLTCLVKGFYPSDIAVEWESNGQPENNYKTTPPVLDSDGSFFLYSKLTVDKSRWQQGNVFSCSVMHEALHNHYTQKSLSLSPGGGGSGGGSAPTSSSTKKTQLQLEHLLLDLQMILNGINNYKNPKLTRMLTFKFYMPKKATELKHLQCLEEELKPLEEVLNLAQSKNFHLRPRDLISNINVIVLELKGSETTFMCEYADETATIVEFLNRWITFSESIISTLT

SEQ ID NO: 91 - protein, 367 aa, Artificial
  P-0304
DKTHTCPPCPAPEAAGAPSVFLFPPKPKDTLMISRTPEVTCVVVDVSHEDPEVKFNWYVDGVEVHNAKTKPREEQYNSTYRVVSVLTVLHQDWLNGKEYKCKVSNKALPAPIEKTISKAKGQPREPQVYTLPPSRDELTKNQVSLTCLVKGFYPSDIAVEWESNGQPENNYKTTPPVLDSDGSFFLYSKLTVDKSRWQQGNVFSCSVMHEALHNHYTQKSLSLSPGGGGSGGGSAPTSSSTKKTQLQLEHLLLDLQMILNGINNYKNPKLTRMLTFKFYMPKKATELKHLQCLEEELKPLEEVLNLAQSKNFHLRPRDLISNINVIVLELKGSETTFMCEYADETATIVEFLNRWITFSLSIISTLT

SEQ ID NO: 92 - protein, 367 aa, Artificial
  P-0369
DKTHTCPPCPAPEAAGAPSVFLFPPKPKDTLMISRTPEVTCVVVDVSHEDPEVKFNWYVDGVEVHNAKTKPREEQYNSTYRVVSVLTVLHQDWLNGKEYKCKVSNKALPAPIEKTISKAKGQPREPQVYTLPPSRDELTKNQVSLTCLVKGFYPSDIAVEWESNGQPENNYKTTPPVLDSDGSFFLYSKLTVDKSRWQQGNVFSCSVMHEALHNHYTQKSLSLSPGGGGSGGGSAPTSSSTKKTQLQLEHLLLDLQMILNGINNYKNPKLTRMLTFKFYMPKKATELKHLQCLEEELKPLEEVLNLAQSKNFHLRPRDLISNINVIVLELKGSETTFMCEYADETATIVEFLNRWITFSNSIISTLT

SEQ ID NO: 93 - protein, 367 aa, Artificial
  P-0370
DKTHTCPPCPAPEAAGAPSVFLFPPKPKDTLMISRTPEVTCVVVDVSHEDPEVKFNWYVDGVEVHNAKTKPREEQYNSTYRVVSVLTVLHQDWLNGKEYKCKVSNKALPAPIEKTISKAKGQPREPQVYTLPPSRDELTKNQVSLTCLVKGFYPSDIAVEWESNGQPENNYKTTPPVLDSDGSFFLYSKLTVDKSRWQQGNVFSCSVMHEALHNHYTQKSLSLSPGGGGSGGGSAPTSSSTKKTQLQLEHLLLDLQMILNGINNYKNPKLTRMLTFKFYMPKKATELKHLQCLEEELKPLEEVLNLAQSKNFHLRPRDLISNINVIVLELKGSETTFMCEYADETATIVEFLNRWITFSDSIISTLT

SEQ ID NO: 94 - protein, 367 aa, Artificial
  P-0371
DKTHTCPPCPAPEAAGAPSVFLFPPKPKDTLMISRTPEVTCVVVDVSHEDPEVKFNWYVDGVEVHNAKTKPREEQYNSTYRVVSVLTVLHQDWLNGKEYKCKVSNKALPAPIEKTISKAKGQPREPQVYTLPPSRDELTKNQVSLTCLVKGFYPSDIAVEWESNGQPENNYKTTPPVLDSDGSFFLYSKLTVDKSRWQQGNVFSCSVMHEALHNHYTQKSLSLSPGGGGSGGGSAPTSSSTKKTQLQLEHLLLDLQMILNGINNYKNPKLTRMLTFKFYMPKKATELKHLQCLEEELKPLEEVLNLAQSKNFHLRPRDLISNINVIVLELKGSETTFMCEYADETATIVEFLNRWITFSMSIISTLT

SEQ ID NO: 95 - protein, 367 aa, Artificial
  P-0251
DKTHTCPPCPAPEAAGAPSVFLFPPKPKDTLMISRTPEVTCVVVDVSHEDPEVKFNWYVDGVEVHNAKTKPREEQYNSTYRVVSVLTVLHQDWLNGKEYKCKVSNKALPAPIEKTISKAKGQPREPQVYTLPPSRDELTKNQVSLTCLVKGFYPSDIAVEWESNGQPENNYKTTPPVLDSDGSFFLYSKLTVDKSRWQQGNVFSCSVMHEALHNHYTQKSLSLSPGGGGSGGGSAPTSSSTKKTQLQLEHLLLILQMILNGINNYKNPKLTRMLTFKFYMPKKATELKHLQCLEEELKPLEEVLNLAQSKNFHLRPRDLISGINVIVLELKGSETTFMCEYADETATIVEFLNRWITFSQSIISTLT

SEQ ID NO: 96 - protein, 367 aa, Artificial
  P-0317
DKTHTCPPCPAPEAAGAPSVFLFPPKPKDTLMISRTPEVTCVVVDVSHEDPEVKFNWYVDGVEVHNAKTKPREEQYNSTYRVVSVLTVLHQDWLNGKEYKCKVSNKALPAPIEKTISKAKGQPREPQVYTLPPSRDELTKNQVSLTCLVKGFYPSDIAVEWESNGQPENNYKTTPPVLDSDGSFFLYSKLTVDKSRWQQGNVFSCSVMHEALHNHYTQKSLSLSPGGGGSGGGSAPTSSSTKKTQLQLEHLLLILQMILNGINNYKNPKLTRMLTFKFYMPKKATELKHLQCLEEELKPLEEVLNLAQSKNFHLRPRDLISRINVIVLELKGSETTFMCEYADETATIVEFLNRWITFSQSIISTLT

SEQ ID NO: 97 - protein, 367 aa, Artificial
  P-0318
DKTHTCPPCPAPEAAGAPSVFLFPPKPKDTLMISRTPEVTCVVVDVSHEDPEVKFNWYVDGVEVHNAKTKPREEQYNSTYRVVSVLTVLHQDWLNGKEYKCKVSNKALPAPIEKTISKAKGQPREPQVYTLPPSRDELTKNQVSLTCLVKGFYPSDIAVEWESNGQPENNYKTTPPVLDSDGSFFLYSKLTVDKSRWQQGNVFSCSVMHEALHNHYTQKSLSLSPGGGGSGGGSAPTSSSTKKTQLQLEHLLLILQMILNGINNYKNPKLTRMLTFKFYMPKKATELKHLQCLEEELKPLEEVLNLAQSKNFHLRPRDLISIINVIVLELKGSETTFMCEYADETATIVEFLNRWITFSQSIISTLT

SEQ ID NO: 98 - protein, 367 aa, Artificial
  P-0324
DKTHTCPPCPAPEAAGAPSVFLFPPKPKDTLMISRTPEVTCVVVDVSHEDPEVKFNWYVDGVEVHNAKTKPREEQYNSTYRVVSVLTVLHQDWLNGKEYKCKVSNKALPAPIEKTISKAKGQPREPQVYTLPPSRDELTKNQVSLTCLVKGFYPSDIAVEWESNGQPENNYKTTPPVLDSDGSFFLYSKLTVDKSRWQQGNVFSCSVMHEALHNHYTQKSLSLSPGGGGSGGGSAPTSSSTKKTQLQLEHLLLTLQMILNGINNYKNPKLTRMLTFKFYMPKKATELKHLQCLEEELKPLEEVLNLAQSKNFHLRPRDLISRINVIVLELKGSETTFMCEYADETATIVEFLNRWITFSQSIISTLT

SEQ ID NO: 99 - protein, 367 aa, Artificial
  P-0322
DKTHTCPPCPAPEAAGAPSVFLFPPKPKDTLMISRTPEVTCVVVDVSHEDPEVKFNWYVDGVEVHNAKTKPREEQYNSTYRVVSVLTVLHQDWLNGKEYKCKVSNKALPAPIEKTISKAKGQPREPQVYTLPPSRDELTKNQVSLTCLVKGFYPSDIAVEWESNGQPENNYKTTPPVLDSDGSFFLYSKLTVDKSRWQQGNVFSCSVMHEALHNHYTQKSLSLSPGGGGSGGGSAPTSSSTKKTQLQLEHLLLTLQMILNGINNYKNPKLTRMLTFKFYMPKKATELKHLQCLEEELKPLEEVLNLAQSKNFHLRPRDLISNINVIVLELKGSETTFMCEYADETATIVEFLNRWITFSESIISTLT

SEQ ID NO: 100 - protein, 367 aa, Artificial
  P-0323
DKTHTCPPCPAPEAAGAPSVFLFPPKPKDTLMISRTPEVTCVVVDVSHEDPEVKFNWYVDGVEVHNAKTKPREEQYNSTYRVVSVLTVLHQDWLNGKEYKCKVSNKALPAPIEKTISKAKGQPREPQVYTLPPSRDELTKNQVSLTCLVKGFYPSDIAVEWESNGQPENNYKTTPPVLDSDGSFFLYSKLTVDKSRWQQGNVFSCSVMHEALHNHYTQKSLSLSPGGGGSGGGSAPTSSSTKKTQLQLEHLLLTLQMILNGINNYKNPKLTRMLTFKFYMPKKATELKHLQCLEEELKPLEEVLNLAQSKNFHLRPRDLISNINVIVLELKGSETTFMCEYADETATIVEFLNRWITFSLSIISTLT

SEQ ID NO: 101 - protein, 367 aa, Artificial
  P-0325
DKTHTCPPCPAPEAAGAPSVFLFPPKPKDTLMISRTPEVTCVVVDVSHEDPEVKFNWYVDGVEVHNAKTKPREEQYNSTYRVVSVLTVLHQDWLNGKEYKCKVSNKALPAPIEKTISKAKGQPREPQVYTLPPSRDELTKNQVSLTCLVKGFYPSDIAVEWESNGQPENNYKTTPPVLDSDGSFFLYSKLTVDKSRWQQGNVFSCSVMHEALHNHYTQKSLSLSPGGGGSGGGSAPTSSSTKKTQLQLEHLLLTLQMILNGINNYKNPKLTRMLTFKFYMPKKATELKHLQCLEEELKPLEEVLNLAQSKNFHLRPRDLISRINVIVLELKGSETTFMCEYADETATIVEFLNRWITFSESIISTLT

SEQ ID NO: 102 - protein, 367 aa, Artificial
  P-0326
DKTHTCPPCPAPEAAGAPSVFLFPPKPKDTLMISRTPEVTCVVVDVSHEDPEVKFNWYVDGVEVHNAKTKPREEQYNSTYRVVSVLTVLHQDWLNGKEYKCKVSNKALPAPIEKTISKAKGQPREPQVYTLPPSRDELTKNQVSLTCLVKGFYPSDIAVEWESNGQPENNYKTTPPVLDSDGSFFLYSKLTVDKSRWQQGNVFSCSVMHEALHNHYTQKSLSLSPGGGGSGGGSAPTSSSTKKTQLQLEHLLLTLQMILNGINNYKNPKLTRMLTFKFYMPKKATELKHLQCLEEELKPLEEVLNLAQSKNFHLRPRDLISRINVIVLELKGSETTFMCEYADETATIVEFLNRWITFSLSIISTLT

SEQ ID NO: 103 - protein, 367 aa, Artificial
  P-0417
DKTHTCPPCPAPEAAGAPSVFLFPPKPKDTLMISRTPEVTCVVVDVSHEDPEVKFNWYVDGVEVHNAKTKPREEQYNSTYRVVSVLTVLHQDWLNGKEYKCKVSNKALPAPIEKTISKAKGQPREPQVYTLPPSRDELTKNQVSLTCLVKGFYPSDIAVEWESNGQPENNYKTTPPVLDSDGSFFLYSKLTVDKSRWQQGNVFSCSVMHEALHNHYTQKSLSLSPGGGGSGGGSAPTSSSTKKTQLQLEHLLNDLQMILNGINNYKNPKLTRMLTFKFYMPKKATELKHLQCLEEELKPLEEVLNLAQSKNFHLRPRDLISNINVIVLELKGSETTFMCEYADETATIVEFLNRWITFSESIISTLT

SEQ ID NO: 104 - protein, 367 aa, Artificial
  P-0418
DKTHTCPPCPAPEAAGAPSVFLFPPKPKDTLMISRTPEVTCVVVDVSHEDPEVKFNWYVDGVEVHNAKTKPREEQYNSTYRVVSVLTVLHQDWLNGKEYKCKVSNKALPAPIEKTISKAKGQPREPQVYTLPPSRDELTKNQVSLTCLVKGFYPSDIAVEWESNGQPENNYKTTPPVLDSDGSFFLYSKLTVDKSRWQQGNVFSCSVMHEALHNHYTQKSLSLSPGGGGSGGGSAPTSSSTKKTQLQLEHLLRDLQMILNGINNYKNPKLTRMLTFKFYMPKKATELKHLQCLEEELKPLEEVLNLAQSKNFHLRPRDLISNINVIVLELKGSETTFMCEYADETATIVEFLNRWITFSESIISTLT

SEQ ID NO: 105 - protein, 367 aa, Artificial
  P-0419
DKTHTCPPCPAPEAAGAPSVFLFPPKPKDTLMISRTPEVTCVVVDVSHEDPEVKFNWYVDGVEVHNAKTKPREEQYNSTYRVVSVLTVLHQDWLNGKEYKCKVSNKALPAPIEKTISKAKGQPREPQVYTLPPSRDELTKNQVSLTCLVKGFYPSDIAVEWESNGQPENNYKTTPPVLDSDGSFFLYSKLTVDKSRWQQGNVFSCSVMHEALHNHYTQKSLSLSPGGGGSGGGSAPTSSSTKKTQLQLEHLLYDLQMILNGINNYKNPKLTRMLTFKFYMPKKATELKHLQCLEEELKPLEEVLNLAQSKNFHLRPRDLISNINVIVLELKGSETTFMCEYADETATIVEFLNRWITFSESIISTLT

SEQ ID NO: 106 - protein, 371 aa, Artificial
  P-0416
APTSSSTKKTQLQLEHLLNDLQMILNGINNYKNPKLTRMLTFKFYMPKKATELKHLQCLEEELKPLEEVLNLAQSKNFHLRPRDLISNINVIVLELKGSETTFMCEYADETATIVEFLNRWITFSQSIISTLTAEAAAKEAAAKEAAAKACPPCPAPEAAGAPSVFLFPPKPKDTLMISRTPEVTCVVVDVSHEDPEVKFNWYVDGVEVHNAKTKPREEQYNSTYRVVSVLTVLHQDWLNGKEYKCKVSNKALPAPIEKTISKAKGQPREPQVYTLPPSRDELTKNQVSLTCLVKGFYPSDIAVEWESNGQPENNYKTTPPVLDSDGSFFLYSKLTVDKSRWQQGNVFSCSVMHEALHNHYTQKSLSLSPG

SEQ ID NO: 107 - protein, 371 aa, Artificial
  P-0412
APTSSSTKKTQLQLEHLLLELQMILNGINNYKNPKLTRMLTFKFYMPKKATELKHLQCLEEELKPLEEVLNLAQSKNFHLRPRDLISNINVIVLELKGSETTFMCEYADETATIVEFLNRWITFSQSIISTLTAEAAAKEAAAKEAAAKACPPCPAPEAAGAPSVFLFPPKPKDTLMISRTPEVTCVVVDVSHEDPEVKFNWYVDGVEVHNAKTKPREEQYNSTYRVVSVLTVLHQDWLNGKEYKCKVSNKALPAPIEKTISKAKGQPREPQVYTLPPSRDELTKNQVSLTCLVKGFYPSDIAVEWESNGQPENNYKTTPPVLDSDGSFFLYSKLTVDKSRWQQGNVFSCSVMHEALHNHYTQKSLSLSPG

SEQ ID NO: 108 - protein, 371 aa, Artificial
  P-0306
APTSSSTKKTQLQLEHLLLILQMILNGINNYKNPKLTRMLTFKFYMPKKATELKHLQCLEEELKPLEEVLNLAQSKNFHLRPRDLISNINVIVLELKGSETTFMCEYADETATIVEFLNRWITFSQSIISTLTAEAAAKEAAAKEAAAKACPPCPAPEAAGAPSVFLFPPKPKDTLMISRTPEVTCVVVDVSHEDPEVKFNWYVDGVEVHNAKTKPREEQYNSTYRVVSVLTVLHQDWLNGKEYKCKVSNKALPAPIEKTISKAKGQPREPQVYTLPPSRDELTKNQVSLTCLVKGFYPSDIAVEWESNGQPENNYKTTPPVLDSDGSFFLYSKLTVDKSRWQQGNVFSCSVMHEALHNHYTQKSLSLSPG

SEQ ID NO: 109 - protein, 371 aa, Artificial
  P-0319
APTSSSTKKTQLQLEHLLLILQMILNGINNYKNPKLTRMLTFKFYMPKKATELKHLQCLEEELKPLEEVLNLAQSKNFHLRPRDLISRINVIVLELKGSETTFMCEYADETATIVEFLNRWITFSQSIISTLTAEAAAKEAAAKEAAAKACPPCPAPEAAGAPSVFLFPPKPKDTLMISRTPEVTCVVVDVSHEDPEVKFNWYVDGVEVHNAKTKPREEQYNSTYRVVSVLTVLHQDWLNGKEYKCKVSNKALPAPIEKTISKAKGQPREPQVYTLPPSRDELTKNQVSLTCLVKGFYPSDIAVEWESNGQPENNYKTTPPVLDSDGSFFLYSKLTVDKSRWQQGNVFSCSVMHEALHNHYTQKSLSLSPG

SEQ ID NO: 110 - protein, 367 aa, Artificial
  P-0582
DKTHTCPPCPAPEAAGAPSVFLFPPKPKDTLMISRTPEVTCVVVDVSHEDPEVKFNWYVDGVEVHNAKTKPREEQYNSTYRVVSVLTVLHQDWLNGKEYKCKVSNKALPAPIEKTISKAKGQPREPQVYTLPPSRDELTKNQVSLTCLVKGFYPSDIAVEWESNGQPENNYKTTPPVLDSDGSFFLYSKLTVDKSRWQQGNVFSCSVMHEALHNHYTQKSLSLSPGGGGSGGGSAPTSSSTKKTQLQLEHLLLTLQMILNGINNYKNPKLTRMLTFKFYMPKKATELKHLQCLEEELKPLEEVLNLAQSKNFHLRPRDLISNINVIVLELKGSETTFMCEYADETATIVEFLNRWITFIKSIISTLT

SEQ ID NO: 111 - protein, 367 aa, Artificial
  P-0583
DKTHTCPPCPAPEAAGAPSVFLFPPKPKDTLMISRTPEVTCVVVDVSHEDPEVKFNWYVDGVEVHNAKTKPREEQYNSTYRVVSVLTVLHQDWLNGKEYKCKVSNKALPAPIEKTISKAKGQPREPQVYTLPPSRDELTKNQVSLTCLVKGFYPSDIAVEWESNGQPENNYKTTPPVLDSDGSFFLYSKLTVDKSRWQQGNVFSCSVMHEALHNHYTQKSLSLSPGGGGSGGGSAPTSSSTKKTQLQLEHLLNDLQMILNGINNYKNPKLTRMLTFKFYMPKKATELKHLQCLEEELKPLEEVLNLAQSKNFHLRPRDLISNINVIVLELKGSETTFMCEYADETATIVEFLNRWITFIKSIISTLT

SEQ ID NO: 112 - protein, 367 aa, Artificial
  P-0584
DKTHTCPPCPAPEAAGAPSVFLFPPKPKDTLMISRTPEVTCVVVDVSHEDPEVKFNWYVDGVEVHNAKTKPREEQYNSTYRVVSVLTVLHQDWLNGKEYKCKVSNKALPAPIEKTISKAKGQPREPQVYTLPPSRDELTKNQVSLTCLVKGFYPSDIAVEWESNGQPENNYKTTPPVLDSDGSFFLYSKLTVDKSRWQQGNVFSCSVMHEALHNHYTQKSLSLSPGGGGSGGGSAPTSSSTKKTQLQLEHLLRDLQMILNGINNYKNPKLTRMLTFKFYMPKKATELKHLQCLEEELKPLEEVLNLAQSKNFHLRPRDLISNINVIVLELKGSETTFMCEYADETATIVEFLNRWITFIKSIISTLT

SEQ ID NO: 113 - protein, 133 aa, Artificial
  IL-2 L19S variant sequence
APTSSSTKKTQLQLEHLLSDLQMILNGINNYKNPKLTRMLTFKFYMPKKATELKHLQCLEEELKPLEEVLNLAQSKNFHLRPRDLISNINVIVLELKGSETTFMCEYADETATIVEFLNRWITFSQSIISTLT

SEQ ID NO: 114 - protein, 133 aa, Artificial
  IL-2 L21S variant sequence
APTSSSTKKTQLQLEHLLLDSQMILNGINNYKNPKLTRMLTFKFYMPKKATELKHLQCLEEELKPLEEVLNLAQSKNFHLRPRDLISNINVIVLELKGSETTFMCEYADETATIVEFLNRWITFSQSIISTLT

SEQ ID NO: 115 - protein, 133 aa, Artificial
  IL-2 L21N variant sequence
APTSSSTKKTQLQLEHLLLDNQMILNGINNYKNPKLTRMLTFKFYMPKKATELKHLQCLEEELKPLEEVLNLAQSKNFHLRPRDLISNINVIVLELKGSETTFMCEYADETATIVEFLNRWITFSQSIISTLT

SEQ ID NO: 116 - protein, 133 aa, Artificial
  IL-2 L21R variant sequence
APTSSSTKKTQLQLEHLLLDRQMILNGINNYKNPKLTRMLTFKFYMPKKATELKHLQCLEEELKPLEEVLNLAQSKNFHLRPRDLISNINVIVLELKGSETTFMCEYADETATIVEFLNRWITFSQSIISTLT

SEQ ID NO: 117 - protein, 133 aa, Artificial
  IL-2 Q126K variant sequence
APTSSSTKKTQLQLEHLLLDLQMILNGINNYKNPKLTRMLTFKFYMPKKATELKHLQCLEEELKPLEEVLNLAQSKNFHLRPRDLISNINVIVLELKGSETTFMCEYADETATIVEFLNRWITFSKSIISTLT

SEQ ID NO: 118 - protein, 133 aa, Artificial
  IL-2 Q126H variant sequence
APTSSSTKKTQLQLEHLLLDLQMILNGINNYKNPKLTRMLTFKFYMPKKATELKHLQCLEEELKPLEEVLNLAQSKNFHLRPRDLISNINVIVLELKGSETTFMCEYADETATIVEFLNRWITFSHSIISTLT

SEQ ID NO: 119 - protein, 133 aa, Artificial
  IL-2 Q126Y variant sequence
APTSSSTKKTQLQLEHLLLDLQMILNGINNYKNPKLTRMLTFKFYMPKKATELKHLQCLEEELKPLEEVLNLAQSKNFHLRPRDLISNINVIVLELKGSETTFMCEYADETATIVEFLNRWITFSYSIISTLT

SEQ ID NO: 120 - protein, 133 aa, Artificial
  IL-2 S125E variant sequence
APTSSSTKKTQLQLEHLLLDLQMILNGINNYKNPKLTRMLTFKFYMPKKATELKHLQCLEEELKPLEEVLNLAQSKNFHLRPRDLISNINVIVLELKGSETTFMCEYADETATIVEFLNRWITFEQSIISTLT

SEQ ID NO: 121 - protein, 133 aa, Artificial
  IL-2 S125K variant sequence
APTSSSTKKTQLQLEHLLLDLQMILNGINNYKNPKLTRMLTFKFYMPKKATELKHLQCLEEELKPLEEVLNLAQSKNFHLRPRDLISNINVIVLELKGSETTFMCEYADETATIVEFLNRWITFKQSIISTLT

SEQ ID NO: 122 - protein, 133 aa, Artificial
  IL-2 S125H variant sequence
APTSSSTKKTQLQLEHLLLDLQMILNGINNYKNPKLTRMLTFKFYMPKKATELKHLQCLEEELKPLEEVLNLAQSKNFHLRPRDLISNINVIVLELKGSETTFMCEYADETATIVEFLNRWITFHQSIISTLT

SEQ ID NO: 123 - protein, 133 aa, Artificial
  IL-2 S125W variant sequence
APTSSSTKKTQLQLEHLLLDLQMILNGINNYKNPKLTRMLTFKFYMPKKATELKHLQCLEEELKPLEEVLNLAQSKNFHLRPRDLISNINVIVLELKGSETTFMCEYADETATIVEFLNRWITFWQSIISTLT

SEQ ID NO: 124 - protein, 133 aa, Artificial
  IL-2 S125I variant sequence
APTSSSTKKTQLQLEHLLLDLQMILNGINNYKNPKLTRMLTFKFYMPKKATELKHLQCLEEELKPLEEVLNLAQSKNFHLRPRDLISNINVIVLELKGSETTFMCEYADETATIVEFLNRWITFIQSIISTLT

SEQ ID NO: 125 - protein, 133 aa, Artificial
  IL-2 Q22N variant sequence
APTSSSTKKTQLQLEHLLLDLNMILNGINNYKNPKLTRMLTFKFYMPKKATELKHLQCLEEELKPLEEVLNLAQSKNFHLRPRDLISNINVIVLELKGSETTFMCEYADETATIVEFLNRWITFSQSIISTLT

SEQ ID NO: 126 - protein, 133 aa, Artificial
  IL-2 Q22H variant sequence
APTSSSTKKTQLQLEHLLLDLHMILNGINNYKNPKLTRMLTFKFYMPKKATELKHLQCLEEELKPLEEVLNLAQSKNFHLRPRDLISNINVIVLELKGSETTFMCEYADETATIVEFLNRWITFSQSIISTLT

SEQ ID NO: 127 - protein, 133 aa, Artificial
  IL-2 Q22K variant sequence
APTSSSTKKTQLQLEHLLLDLKMILNGINNYKNPKLTRMLTFKFYMPKKATELKHLQCLEEELKPLEEVLNLAQSKNFHLRPRDLISNINVIVLELKGSETTFMCEYADETATIVEFLNRWITFSQSIISTLT

SEQ ID NO: 128 - protein, 133 aa, Artificial
  IL-2 Q22Y variant sequence
APTSSSTKKTQLQLEHLLLDLYMILNGINNYKNPKLTRMLTFKFYMPKKATELKHLQCLEEELKPLEEVLNLAQSKNFHLRPRDLISNINVIVLELKGSETTFMCEYADETATIVEFLNRWITFSQSIISTLT

SEQ ID NO: 129 - protein, 133 aa, Artificial
  IL-2 Q22I variant sequence
APTSSSTKKTQLQLEHLLLDLIMILNGINNYKNPKLTRMLTFKFYMPKKATELKHLQCLEEELKPLEEVLNLAQSKNFHLRPRDLISNINVIVLELKGSETTFMCEYADETATIVEFLNRWITFSQSIISTLT

SEQ ID NO: 130 - protein, 133 aa, Artificial
  IL-2 L19H/Q126E variant sequence
APTSSSTKKTQLQLEHLLHDLQMILNGINNYKNPKLTRMLTFKFYMPKKATELKHLQCLEEELKPLEEVLNLAQSKNFHLRPRDLISNINVIVLELKGSETTFMCEYADETATIVEFLNRWITFSESIISTLT

SEQ ID NO: 131 - protein, 133 aa, Artificial
  IL-2 L19Q/Q126E variant sequence
APTSSSTKKTQLQLEHLLQDLQMILNGINNYKNPKLTRMLTFKFYMPKKATELKHLQCLEEELKPLEEVLNLAQSKNFHLRPRDLISNINVIVLELKGSETTFMCEYADETATIVEFLNRWITFSESIISTLT

SEQ ID NO: 132 - protein, 133 aa, Artificial
  IL-2 L19S/Q126E variant sequence
APTSSSTKKTQLQLEHLLSDLQMILNGINNYKNPKLTRMLTFKFYMPKKATELKHLQCLEEELKPLEEVLNLAQSKNFHLRPRDLISNINVIVLELKGSETTFMCEYADETATIVEFLNRWITFSESIISTLT

SEQ ID NO: 133 - protein, 133 aa, Artificial
  IL-2 L19Y/Q126K variant sequence
APTSSSTKKTQLQLEHLLYDLQMILNGINNYKNPKLTRMLTFKFYMPKKATELKHLQCLEEELKPLEEVLNLAQSKNFHLRPRDLISNINVIVLELKGSETTFMCEYADETATIVEFLNRWITFSKSIISTLT

SEQ ID NO: 134 - protein, 133 aa, Artificial
  IL-2 L19Y/Q126H variant sequence
APTSSSTKKTQLQLEHLLYDLQMILNGINNYKNPKLTRMLTFKFYMPKKATELKHLQCLEEELKPLEEVLNLAQSKNFHLRPRDLISNINVIVLELKGSETTFMCEYADETATIVEFLNRWITFSHSIISTLT

SEQ ID NO: 135 - protein, 133 aa, Artificial
  IL-2 L19Y/Q126Y variant sequence
APTSSSTKKTQLQLEHLLYDLQMILNGINNYKNPKLTRMLTFKFYMPKKATELKHLQCLEEELKPLEEVLNLAQSKNFHLRPRDLISNINVIVLELKGSETTFMCEYADETATIVEFLNRWITFSYSIISTLT

SEQ ID NO: 136 - protein, 133 aa, Artificial
  IL-2 L19Y/S125E variant sequence
APTSSSTKKTQLQLEHLLYDLQMILNGINNYKNPKLTRMLTFKFYMPKKATELKHLQCLEEELKPLEEVLNLAQSKNFHLRPRDLISNINVIVLELKGSETTFMCEYADETATIVEFLNRWITFEQSIISTLT

SEQ ID NO: 137 - protein, 133 aa, Artificial
  IL-2 L19Y/S125K variant sequence
APTSSSTKKTQLQLEHLLYDLQMILNGINNYKNPKLTRMLTFKFYMPKKATELKHLQCLEEELKPLEEVLNLAQSKNFHLRPRDLISNINVIVLELKGSETTFMCEYADETATIVEFLNRWITFKQSIISTLT

SEQ ID NO: 138 - protein, 133 aa, Artificial
  IL-2 L19Y/S125H variant sequence
APTSSSTKKTQLQLEHLLYDLQMILNGINNYKNPKLTRMLTFKFYMPKKATELKHLQCLEEELKPLEEVLNLAQSKNFHLRPRDLISNINVIVLELKGSETTFMCEYADETATIVEFLNRWITFHQSIISTLT

SEQ ID NO: 139 - protein, 133 aa, Artificial
  IL-2 L19Y/S125W variant sequence
APTSSSTKKTQLQLEHLLYDLQMILNGINNYKNPKLTRMLTFKFYMPKKATELKHLQCLEEELKPLEEVLNLAQSKNFHLRPRDLISNINVIVLELKGSETTFMCEYADETATIVEFLNRWITFWQSIISTLT

SEQ ID NO: 140 - protein, 133 aa, Artificial
  IL-2 L19Y/S125I variant sequence
APTSSSTKKTQLQLEHLLYDLQMILNGINNYKNPKLTRMLTFKFYMPKKATELKHLQCLEEELKPLEEVLNLAQSKNFHLRPRDLISNINVIVLELKGSETTFMCEYADETATIVEFLNRWITFIQSIISTLT

SEQ ID NO: 141 - protein, 133 aa, Artificial
  IL-2 L19Y/Q22N variant sequence
APTSSSTKKTQLQLEHLLYDLNMILNGINNYKNPKLTRMLTFKFYMPKKATELKHLQCLEEELKPLEEVLNLAQSKNFHLRPRDLISNINVIVLELKGSETTFMCEYADETATIVEFLNRWITFSQSIISTLT

SEQ ID NO: 142 - protein, 133 aa, Artificial
  IL-2 L19Y/Q22H variant sequence
APTSSSTKKTQLQLEHLLYDLHMILNGINNYKNPKLTRMLTFKFYMPKKATELKHLQCLEEELKPLEEVLNLAQSKNFHLRPRDLISNINVIVLELKGSETTFMCEYADETATIVEFLNRWITFSQSIISTLT

SEQ ID NO: 143 - protein, 133 aa, Artificial
  IL-2 L19Y/Q22K variant sequence
APTSSSTKKTQLQLEHLLYDLKMILNGINNYKNPKLTRMLTFKFYMPKKATELKHLQCLEEELKPLEEVLNLAQSKNFHLRPRDLISNINVIVLELKGSETTFMCEYADETATIVEFLNRWITFSQSIISTLT

SEQ ID NO: 144 - protein, 133 aa, Artificial
  IL-2 L19Y/Q22Y variant sequence
APTSSSTKKTQLQLEHLLYDLYMILNGINNYKNPKLTRMLTFKFYMPKKATELKHLQCLEEELKPLEEVLNLAQSKNFHLRPRDLISNINVIVLELKGSETTFMCEYADETATIVEFLNRWITFSQSIISTLT

SEQ ID NO: 145 - protein, 133 aa, Artificial
  IL-2 L19Y/Q22I variant sequence
APTSSSTKKTQLQLEHLLYDLIMILNGINNYKNPKLTRMLTFKFYMPKKATELKHLQCLEEELKPLEEVLNLAQSKNFHLRPRDLISNINVIVLELKGSETTFMCEYADETATIVEFLNRWITFSQSIISTLT

SEQ ID NO: 146 - protein, 133 aa, Artificial
  IL-2 L19H/Q126K variant sequence
APTSSSTKKTQLQLEHLLHDLQMILNGINNYKNPKLTRMLTFKFYMPKKATELKHLQCLEEELKPLEEVLNLAQSKNFHLRPRDLISNINVIVLELKGSETTFMCEYADETATIVEFLNRWITFSKSIISTLT

SEQ ID NO: 147 - protein, 133 aa, Artificial
  IL-2 L19H/S125I variant sequence
APTSSSTKKTQLQLEHLLHDLQMILNGINNYKNPKLTRMLTFKFYMPKKATELKHLQCLEEELKPLEEVLNLAQSKNFHLRPRDLISNINVIVLELKGSETTFMCEYADETATIVEFLNRWITFIQSIISTLT

SEQ ID NO: 148 - protein, 133 aa, Artificial
  IL-2 L19D/S125I variant sequence
APTSSSTKKTQLQLEHLLDDLQMILNGINNYKNPKLTRMLTFKFYMPKKATELKHLQCLEEELKPLEEVLNLAQSKNFHLRPRDLISNINVIVLELKGSETTFMCEYADETATIVEFLNRWITFIQSIISTLT

SEQ ID NO: 149 - protein, 133 aa, Artificial
  IL-2 D20E/S125I variant sequence
APTSSSTKKTQLQLEHLLLELQMILNGINNYKNPKLTRMLTFKFYMPKKATELKHLQCLEEELKPLEEVLNLAQSKNFHLRPRDLISNINVIVLELKGSETTFMCEYADETATIVEFLNRWITFIQSIISTLT

SEQ ID NO: 150 - protein, 133 aa, Artificial
  IL-2 D20T/S125I variant sequence
APTSSSTKKTQLQLEHLLLTLQMILNGINNYKNPKLTRMLTFKFYMPKKATELKHLQCLEEELKPLEEVLNLAQSKNFHLRPRDLISNINVIVLELKGSETTFMCEYADETATIVEFLNRWITFIQSIISTLT

SEQ ID NO: 151 - protein, 133 aa, Artificial
  IL-2 L19Y/S125I/Q126E variant sequence
APTSSSTKKTQLQLEHLLYDLQMILNGINNYKNPKLTRMLTFKFYMPKKATELKHLQCLEEELKPLEEVLNLAQSKNFHLRPRDLISNINVIVLELKGSETTFMCEYADETATIVEFLNRWITFIESIISTLT

SEQ ID NO: 152 - protein, 367 aa, Artificial
  P-0423
DKTHTCPPCPAPEAAGAPSVFLFPPKPKDTLMISRTPEVTCVVVDVSHEDPEVKFNWYVDGVEVHNAKTKPREEQYNSTYRVVSVLTVLHQDWLNGKEYKCKVSNKALPAPIEKTISKAKGQPREPQVYTLPPSRDELTKNQVSLTCLVKGFYPSDIAVEWESNGQPENNYKTTPPVLDSDGSFFLYSKLTVDKSRWQQGNVFSCSVMHEALHNHYTQKSLSLSPGGGGSGGGSAPTSSSTKKTQLQLEHLLQDLQMILNGINNYKNPKLTRMLTFKFYMPKKATELKHLQCLEEELKPLEEVLNLAQSKNFHLRPRDLISNINVIVLELKGSETTFMCEYADETATIVEFLNRWITFSQSIISTLT

SEQ ID NO: 153 - protein, 367 aa, Artificial
  P-0424
DKTHTCPPCPAPEAAGAPSVFLFPPKPKDTLMISRTPEVTCVVVDVSHEDPEVKFNWYVDGVEVHNAKTKPREEQYNSTYRVVSVLTVLHQDWLNGKEYKCKVSNKALPAPIEKTISKAKGQPREPQVYTLPPSRDELTKNQVSLTCLVKGFYPSDIAVEWESNGQPENNYKTTPPVLDSDGSFFLYSKLTVDKSRWQQGNVFSCSVMHEALHNHYTQKSLSLSPGGGGSGGGSAPTSSSTKKTQLQLEHLLHDLQMILNGINNYKNPKLTRMLTFKFYMPKKATELKHLQCLEEELKPLEEVLNLAQSKNFHLRPRDLISNINVIVLELKGSETTFMCEYADETATIVEFLNRWITFSQSIISTLT

SEQ ID NO: 154 - protein, 367 aa, Artificial
  P-0425
DKTHTCPPCPAPEAAGAPSVFLFPPKPKDTLMISRTPEVTCVVVDVSHEDPEVKFNWYVDGVEVHNAKTKPREEQYNSTYRVVSVLTVLHQDWLNGKEYKCKVSNKALPAPIEKTISKAKGQPREPQVYTLPPSRDELTKNQVSLTCLVKGFYPSDIAVEWESNGQPENNYKTTPPVLDSDGSFFLYSKLTVDKSRWQQGNVFSCSVMHEALHNHYTQKSLSLSPGGGGSGGGSAPTSSSTKKTQLQLEHLLDDLQMILNGINNYKNPKLTRMLTFKFYMPKKATELKHLQCLEEELKPLEEVLNLAQSKNFHLRPRDLISNINVIVLELKGSETTFMCEYADETATIVEFLNRWITFSQSIISTLT

SEQ ID NO: 155 - protein, 367 aa, Artificial
  P-0426
DKTHTCPPCPAPEAAGAPSVFLFPPKPKDTLMISRTPEVTCVVVDVSHEDPEVKFNWYVDGVEVHNAKTKPREEQYNSTYRVVSVLTVLHQDWLNGKEYKCKVSNKALPAPIEKTISKAKGQPREPQVYTLPPSRDELTKNQVSLTCLVKGFYPSDIAVEWESNGQPENNYKTTPPVLDSDGSFFLYSKLTVDKSRWQQGNVFSCSVMHEALHNHYTQKSLSLSPGGGGSGGGSAPTSSSTKKTQLQLEHLLPDLQMILNGINNYKNPKLTRMLTFKFYMPKKATELKHLQCLEEELKPLEEVLNLAQSKNFHLRPRDLISNINVIVLELKGSETTFMCEYADETATIVEFLNRWITFSQSIISTLT

SEQ ID NO: 156 - protein, 367 aa, Artificial
  P-0427
DKTHTCPPCPAPEAAGAPSVFLFPPKPKDTLMISRTPEVTCVVVDVSHEDPEVKFNWYVDGVEVHNAKTKPREEQYNSTYRVVSVLTVLHQDWLNGKEYKCKVSNKALPAPIEKTISKAKGQPREPQVYTLPPSRDELTKNQVSLTCLVKGFYPSDIAVEWESNGQPENNYKTTPPVLDSDGSFFLYSKLTVDKSRWQQGNVFSCSVMHEALHNHYTQKSLSLSPGGGGSGGGSAPTSSSTKKTQLQLEHLLSDLQMILNGINNYKNPKLTRMLTFKFYMPKKATELKHLQCLEEELKPLEEVLNLAQSKNFHLRPRDLISNINVIVLELKGSETTFMCEYADETATIVEFLNRWITFSQSIISTLT

SEQ ID NO: 157 - protein, 367 aa, Artificial
  P-0428
DKTHTCPPCPAPEAAGAPSVFLFPPKPKDTLMISRTPEVTCVVVDVSHEDPEVKFNWYVDGVEVHNAKTKPREEQYNSTYRVVSVLTVLHQDWLNGKEYKCKVSNKALPAPIEKTISKAKGQPREPQVYTLPPSRDELTKNQVSLTCLVKGFYPSDIAVEWESNGQPENNYKTTPPVLDSDGSFFLYSKLTVDKSRWQQGNVFSCSVMHEALHNHYTQKSLSLSPGGGGSGGGSAPTSSSTKKTQLQLEHLLLDSQMILNGINNYKNPKLTRMLTFKFYMPKKATELKHLQCLEEELKPLEEVLNLAQSKNFHLRPRDLISNINVIVLELKGSETTFMCEYADETATIVEFLNRWITFSQSIISTLT

SEQ ID NO: 158 - protein, 367 aa, Artificial
  P-0429
DKTHTCPPCPAPEAAGAPSVFLFPPKPKDTLMISRTPEVTCVVVDVSHEDPEVKFNWYVDGVEVHNAKTKPREEQYNSTYRVVSVLTVLHQDWLNGKEYKCKVSNKALPAPIEKTISKAKGQPREPQVYTLPPSRDELTKNQVSLTCLVKGFYPSDIAVEWESNGQPENNYKTTPPVLDSDGSFFLYSKLTVDKSRWQQGNVFSCSVMHEALHNHYTQKSLSLSPGGGGSGGGSAPTSSSTKKTQLQLEHLLLDNQMILNGINNYKNPKLTRMLTFKFYMPKKATELKHLQCLEEELKPLEEVLNLAQSKNFHLRPRDLISNINVIVLELKGSETTFMCEYADETATIVEFLNRWITFSQSIISTLT

SEQ ID NO: 159 - protein, 367 aa, Artificial
  P-0430
DKTHTCPPCPAPEAAGAPSVFLFPPKPKDTLMISRTPEVTCVVVDVSHEDPEVKFNWYVDGVEVHNAKTKPREEQYNSTYRVVSVLTVLHQDWLNGKEYKCKVSNKALPAPIEKTISKAKGQPREPQVYTLPPSRDELTKNQVSLTCLVKGFYPSDIAVEWESNGQPENNYKTTPPVLDSDGSFFLYSKLTVDKSRWQQGNVFSCSVMHEALHNHYTQKSLSLSPGGGGSGGGSAPTSSSTKKTQLQLEHLLLDRQMILNGINNYKNPKLTRMLTFKFYMPKKATELKHLQCLEEELKPLEEVLNLAQSKNFHLRPRDLISNINVIVLELKGSETTFMCEYADETATIVEFLNRWITFSQSIISTLT

SEQ ID NO: 160 - protein, 367 aa, Artificial
  P-0497
DKTHTCPPCPAPEAAGAPSVFLFPPKPKDTLMISRTPEVTCVVVDVSHEDPEVKFNWYVDGVEVHNAKTKPREEQYNSTYRVVSVLTVLHQDWLNGKEYKCKVSNKALPAPIEKTISKAKGQPREPQVYTLPPSRDELTKNQVSLTCLVKGFYPSDIAVEWESNGQPENNYKTTPPVLDSDGSFFLYSKLTVDKSRWQQGNVFSCSVMHEALHNHYTQKSLSLSPGGGGSGGGSAPTSSSTKKTQLQLEHLLLDLQMILNGINNYKNPKLTRMLTFKFYMPKKATELKHLQCLEEELKPLEEVLNLAQSKNFHLRPRDLISNINVIVLELKGSETTFMCEYADETATIVEFLNRWITFSKSIISTLT

SEQ ID NO: 161 - protein, 367 aa, Artificial
  P-0498
DKTHTCPPCPAPEAAGAPSVFLFPPKPKDTLMISRTPEVTCVVVDVSHEDPEVKFNWYVDGVEVHNAKTKPREEQYNSTYRVVSVLTVLHQDWLNGKEYKCKVSNKALPAPIEKTISKAKGQPREPQVYTLPPSRDELTKNQVSLTCLVKGFYPSDIAVEWESNGQPENNYKTTPPVLDSDGSFFLYSKLTVDKSRWQQGNVFSCSVMHEALHNHYTQKSLSLSPGGGGSGGGSAPTSSSTKKTQLQLEHLLLDLQMILNGINNYKNPKLTRMLTFKFYMPKKATELKHLQCLEEELKPLEEVLNLAQSKNFHLRPRDLISNINVIVLELKGSETTFMCEYADETATIVEFLNRWITFSHSIISTLT

SEQ ID NO: 162 - protein, 367 aa, Artificial
  P-0499
DKTHTCPPCPAPEAAGAPSVFLFPPKPKDTLMISRTPEVTCVVVDVSHEDPEVKFNWYVDGVEVHNAKTKPREEQYNSTYRVVSVLTVLHQDWLNGKEYKCKVSNKALPAPIEKTISKAKGQPREPQVYTLPPSRDELTKNQVSLTCLVKGFYPSDIAVEWESNGQPENNYKTTPPVLDSDGSFFLYSKLTVDKSRWQQGNVFSCSVMHEALHNHYTQKSLSLSPGGGGSGGGSAPTSSSTKKTQLQLEHLLLDLQMILNGINNYKNPKLTRMLTFKFYMPKKATELKHLQCLEEELKPLEEVLNLAQSKNFHLRPRDLISNINVIVLELKGSETTFMCEYADETATIVEFLNRWITFSYSIISTLT

SEQ ID NO: 163 - protein, 367 aa, Artificial
  P-0500
DKTHTCPPCPAPEAAGAPSVFLFPPKPKDTLMISRTPEVTCVVVDVSHEDPEVKFNWYVDGVEVHNAKTKPREEQYNSTYRVVSVLTVLHQDWLNGKEYKCKVSNKALPAPIEKTISKAKGQPREPQVYTLPPSRDELTKNQVSLTCLVKGFYPSDIAVEWESNGQPENNYKTTPPVLDSDGSFFLYSKLTVDKSRWQQGNVFSCSVMHEALHNHYTQKSLSLSPGGGGSGGGSAPTSSSTKKTQLQLEHLLLDLQMILNGINNYKNPKLTRMLTFKFYMPKKATELKHLQCLEEELKPLEEVLNLAQSKNFHLRPRDLISNINVIVLELKGSETTFMCEYADETATIVEFLNRWITFEQSIISTLT

SEQ ID NO: 164 - protein, 367 aa, Artificial
  P-0501
DKTHTCPPCPAPEAAGAPSVFLFPPKPKDTLMISRTPEVTCVVVDVSHEDPEVKFNWYVDGVEVHNAKTKPREEQYNSTYRVVSVLTVLHQDWLNGKEYKCKVSNKALPAPIEKTISKAKGQPREPQVYTLPPSRDELTKNQVSLTCLVKGFYPSDIAVEWESNGQPENNYKTTPPVLDSDGSFFLYSKLTVDKSRWQQGNVFSCSVMHEALHNHYTQKSLSLSPGGGGSGGGSAPTSSSTKKTQLQLEHLLLDLQMILNGINNYKNPKLTRMLTFKFYMPKKATELKHLQCLEEELKPLEEVLNLAQSKNFHLRPRDLISNINVIVLELKGSETTFMCEYADETATIVEFLNRWITFKQSIISTLT

SEQ ID NO: 165 - protein, 367 aa, Artificial
  P-0502
DKTHTCPPCPAPEAAGAPSVFLFPPKPKDTLMISRTPEVTCVVVDVSHEDPEVKFNWYVDGVEVHNAKTKPREEQYNSTYRVVSVLTVLHQDWLNGKEYKCKVSNKALPAPIEKTISKAKGQPREPQVYTLPPSRDELTKNQVSLTCLVKGFYPSDIAVEWESNGQPENNYKTTPPVLDSDGSFFLYSKLTVDKSRWQQGNVFSCSVMHEALHNHYTQKSLSLSPGGGGSGGGSAPTSSSTKKTQLQLEHLLLDLQMILNGINNYKNPKLTRMLTFKFYMPKKATELKHLQCLEEELKPLEEVLNLAQSKNFHLRPRDLISNINVIVLELKGSETTFMCEYADETATIVEFLNRWITFHQSIISTLT

SEQ ID NO: 166 - protein, 367 aa, Artificial
  P-0503
DKTHTCPPCPAPEAAGAPSVFLFPPKPKDTLMISRTPEVTCVVVDVSHEDPEVKFNWYVDGVEVHNAKTKPREEQYNSTYRVVSVLTVLHQDWLNGKEYKCKVSNKALPAPIEKTISKAKGQPREPQVYTLPPSRDELTKNQVSLTCLVKGFYPSDIAVEWESNGQPENNYKTTPPVLDSDGSFFLYSKLTVDKSRWQQGNVFSCSVMHEALHNHYTQKSLSLSPGGGGSGGGSAPTSSSTKKTQLQLEHLLLDLQMILNGINNYKNPKLTRMLTFKFYMPKKATELKHLQCLEEELKPLEEVLNLAQSKNFHLRPRDLISNINVIVLELKGSETTFMCEYADETATIVEFLNRWITFWQSIISTLT

SEQ ID NO: 167 - protein, 367 aa, Artificial
  P-0531
DKTHTCPPCPAPEAAGAPSVFLFPPKPKDTLMISRTPEVTCVVVDVSHEDPEVKFNWYVDGVEVHNAKTKPREEQYNSTYRVVSVLTVLHQDWLNGKEYKCKVSNKALPAPIEKTISKAKGQPREPQVYTLPPSRDELTKNQVSLTCLVKGFYPSDIAVEWESNGQPENNYKTTPPVLDSDGSFFLYSKLTVDKSRWQQGNVFSCSVMHEALHNHYTQKSLSLSPGGGGSGGGSAPTSSSTKKTQLQLEHLLLDLQMILNGINNYKNPKLTRMLTFKFYMPKKATELKHLQCLEEELKPLEEVLNLAQSKNFHLRPRDLISNINVIVLELKGSETTFMCEYADETATIVEFLNRWITFIQSIISTLT

SEQ ID NO: 168 - protein, 367 aa, Artificial
  P-0505
DKTHTCPPCPAPEAAGAPSVFLFPPKPKDTLMISRTPEVTCVVVDVSHEDPEVKFNWYVDGVEVHNAKTKPREEQYNSTYRVVSVLTVLHQDWLNGKEYKCKVSNKALPAPIEKTISKAKGQPREPQVYTLPPSRDELTKNQVSLTCLVKGFYPSDIAVEWESNGQPENNYKTTPPVLDSDGSFFLYSKLTVDKSRWQQGNVFSCSVMHEALHNHYTQKSLSLSPGGGGSGGGSAPTSSSTKKTQLQLEHLLLDLNMILNGINNYKNPKLTRMLTFKFYMPKKATELKHLQCLEEELKPLEEVLNLAQSKNFHLRPRDLISNINVIVLELKGSETTFMCEYADETATIVEFLNRWITFSQSIISTLT

SEQ ID NO: 169 - protein, 367 aa, Artificial
  P-0506
DKTHTCPPCPAPEAAGAPSVFLFPPKPKDTLMISRTPEVTCVVVDVSHEDPEVKFNWYVDGVEVHNAKTKPREEQYNSTYRVVSVLTVLHQDWLNGKEYKCKVSNKALPAPIEKTISKAKGQPREPQVYTLPPSRDELTKNQVSLTCLVKGFYPSDIAVEWESNGQPENNYKTTPPVLDSDGSFFLYSKLTVDKSRWQQGNVFSCSVMHEALHNHYTQKSLSLSPGGGGSGGGSAPTSSSTKKTQLQLEHLLLDLHMILNGINNYKNPKLTRMLTFKFYMPKKATELKHLQCLEEELKPLEEVLNLAQSKNFHLRPRDLISNINVIVLELKGSETTFMCEYADETATIVEFLNRWITFSQSIISTLT

SEQ ID NO: 170 - protein, 367 aa, Artificial
  P-0507
DKTHTCPPCPAPEAAGAPSVFLFPPKPKDTLMISRTPEVTCVVVDVSHEDPEVKFNWYVDGVEVHNAKTKPREEQYNSTYRVVSVLTVLHQDWLNGKEYKCKVSNKALPAPIEKTISKAKGQPREPQVYTLPPSRDELTKNQVSLTCLVKGFYPSDIAVEWESNGQPENNYKTTPPVLDSDGSFFLYSKLTVDKSRWQQGNVFSCSVMHEALHNHYTQKSLSLSPGGGGSGGGSAPTSSSTKKTQLQLEHLLLDLKMILNGINNYKNPKLTRMLTFKFYMPKKATELKHLQCLEEELKPLEEVLNLAQSKNFHLRPRDLISNINVIVLELKGSETTFMCEYADETATIVEFLNRWITFSQSIISTLT

SEQ ID NO: 171 - protein, 367 aa, Artificial
  P-0508
DKTHTCPPCPAPEAAGAPSVFLFPPKPKDTLMISRTPEVTCVVVDVSHEDPEVKFNWYVDGVEVHNAKTKPREEQYNSTYRVVSVLTVLHQDWLNGKEYKCKVSNKALPAPIEKTISKAKGQPREPQVYTLPPSRDELTKNQVSLTCLVKGFYPSDIAVEWESNGQPENNYKTTPPVLDSDGSFFLYSKLTVDKSRWQQGNVFSCSVMHEALHNHYTQKSLSLSPGGGGSGGGSAPTSSSTKKTQLQLEHLLLDLYMILNGINNYKNPKLTRMLTFKFYMPKKATELKHLQCLEEELKPLEEVLNLAQSKNFHLRPRDLISNINVIVLELKGSETTFMCEYADETATIVEFLNRWITFSQSIISTLT

SEQ ID NO: 172 - protein, 367 aa, Artificial
  P-0509
DKTHTCPPCPAPEAAGAPSVFLFPPKPKDTLMISRTPEVTCVVVDVSHEDPEVKFNWYVDGVEVHNAKTKPREEQYNSTYRVVSVLTVLHQDWLNGKEYKCKVSNKALPAPIEKTISKAKGQPREPQVYTLPPSRDELTKNQVSLTCLVKGFYPSDIAVEWESNGQPENNYKTTPPVLDSDGSFFLYSKLTVDKSRWQQGNVFSCSVMHEALHNHYTQKSLSLSPGGGGSGGGSAPTSSSTKKTQLQLEHLLLDLIMILNGINNYKNPKLTRMLTFKFYMPKKATELKHLQCLEEELKPLEEVLNLAQSKNFHLRPRDLISNINVIVLELKGSETTFMCEYADETATIVEFLNRWITFSQSIISTLT

SEQ ID NO: 173 - protein, 367 aa, Artificial
  P-0447
DKTHTCPPCPAPEAAGAPSVFLFPPKPKDTLMISRTPEVTCVVVDVSHEDPEVKFNWYVDGVEVHNAKTKPREEQYNSTYRVVSVLTVLHQDWLNGKEYKCKVSNKALPAPIEKTISKAKGQPREPQVYTLPPSRDELTKNQVSLTCLVKGFYPSDIAVEWESNGQPENNYKTTPPVLDSDGSFFLYSKLTVDKSRWQQGNVFSCSVMHEALHNHYTQKSLSLSPGGGGSGGGSAPTSSSTKKTQLQLEHLLHDLQMILNGINNYKNPKLTRMLTFKFYMPKKATELKHLQCLEEELKPLEEVLNLAQSKNFHLRPRDLISNINVIVLELKGSETTFMCEYADETATIVEFLNRWITFSESIISTLT

SEQ ID NO: 174 - protein, 367 aa, Artificial
  P-0448
DKTHTCPPCPAPEAAGAPSVFLFPPKPKDTLMISRTPEVTCVVVDVSHEDPEVKFNWYVDGVEVHNAKTKPREEQYNSTYRVVSVLTVLHQDWLNGKEYKCKVSNKALPAPIEKTISKAKGQPREPQVYTLPPSRDELTKNQVSLTCLVKGFYPSDIAVEWESNGQPENNYKTTPPVLDSDGSFFLYSKLTVDKSRWQQGNVFSCSVMHEALHNHYTQKSLSLSPGGGGSGGGSAPTSSSTKKTQLQLEHLLQDLQMILNGINNYKNPKLTRMLTFKFYMPKKATELKHLQCLEEELKPLEEVLNLAQSKNFHLRPRDLISNINVIVLELKGSETTFMCEYADETATIVEFLNRWITFSESIISTLT

SEQ ID NO: 175 - protein, 367 aa, Artificial
  P-0449
DKTHTCPPCPAPEAAGAPSVFLFPPKPKDTLMISRTPEVTCVVVDVSHEDPEVKFNWYVDGVEVHNAKTKPREEQYNSTYRVVSVLTVLHQDWLNGKEYKCKVSNKALPAPIEKTISKAKGQPREPQVYTLPPSRDELTKNQVSLTCLVKGFYPSDIAVEWESNGQPENNYKTTPPVLDSDGSFFLYSKLTVDKSRWQQGNVFSCSVMHEALHNHYTQKSLSLSPGGGGSGGGSAPTSSSTKKTQLQLEHLLSDLQMILNGINNYKNPKLTRMLTFKFYMPKKATELKHLQCLEEELKPLEEVLNLAQSKNFHLRPRDLISNINVIVLELKGSETTFMCEYADETATIVEFLNRWITFSESIISTLT

SEQ ID NO: 176 - protein, 367 aa, Artificial
  P-0464
DKTHTCPPCPAPEAAGAPSVFLFPPKPKDTLMISRTPEVTCVVVDVSHEDPEVKFNWYVDGVEVHNAKTKPREEQYNSTYRVVSVLTVLHQDWLNGKEYKCKVSNKALPAPIEKTISKAKGQPREPQVYTLPPSRDELTKNQVSLTCLVKGFYPSDIAVEWESNGQPENNYKTTPPVLDSDGSFFLYSKLTVDKSRWQQGNVFSCSVMHEALHNHYTQKSLSLSPGGGGSGGGSAPTSSSTKKTQLQLEHLLYDLQMILNGINNYKNPKLTRMLTFKFYMPKKATELKHLQCLEEELKPLEEVLNLAQSKNFHLRPRDLISNINVIVLELKGSETTFMCEYADETATIVEFLNRWITFSKSIISTLT

SEQ ID NO: 177 - protein, 367 aa, Artificial
  P-0465
DKTHTCPPCPAPEAAGAPSVFLFPPKPKDTLMISRTPEVTCVVVDVSHEDPEVKFNWYVDGVEVHNAKTKPREEQYNSTYRVVSVLTVLHQDWLNGKEYKCKVSNKALPAPIEKTISKAKGQPREPQVYTLPPSRDELTKNQVSLTCLVKGFYPSDIAVEWESNGQPENNYKTTPPVLDSDGSFFLYSKLTVDKSRWQQGNVFSCSVMHEALHNHYTQKSLSLSPGGGGSGGGSAPTSSSTKKTQLQLEHLLYDLQMILNGINNYKNPKLTRMLTFKFYMPKKATELKHLQCLEEELKPLEEVLNLAQSKNFHLRPRDLISNINVIVLELKGSETTFMCEYADETATIVEFLNRWITFSHSIISTLT

SEQ ID NO: 178 - protein, 367 aa, Artificial
  P-0466
DKTHTCPPCPAPEAAGAPSVFLFPPKPKDTLMISRTPEVTCVVVDVSHEDPEVKFNWYVDGVEVHNAKTKPREEQYNSTYRVVSVLTVLHQDWLNGKEYKCKVSNKALPAPIEKTISKAKGQPREPQVYTLPPSRDELTKNQVSLTCLVKGFYPSDIAVEWESNGQPENNYKTTPPVLDSDGSFFLYSKLTVDKSRWQQGNVFSCSVMHEALHNHYTQKSLSLSPGGGGSGGGSAPTSSSTKKTQLQLEHLLYDLQMILNGINNYKNPKLTRMLTFKFYMPKKATELKHLQCLEEELKPLEEVLNLAQSKNFHLRPRDLISNINVIVLELKGSETTFMCEYADETATIVEFLNRWITFSYSIISTLT

SEQ ID NO: 179 - protein, 367 aa, Artificial
  P-0467
DKTHTCPPCPAPEAAGAPSVFLFPPKPKDTLMISRTPEVTCVVVDVSHEDPEVKFNWYVDGVEVHNAKTKPREEQYNSTYRVVSVLTVLHQDWLNGKEYKCKVSNKALPAPIEKTISKAKGQPREPQVYTLPPSRDELTKNQVSLTCLVKGFYPSDIAVEWESNGQPENNYKTTPPVLDSDGSFFLYSKLTVDKSRWQQGNVFSCSVMHEALHNHYTQKSLSLSPGGGGSGGGSAPTSSSTKKTQLQLEHLLYDLQMILNGINNYKNPKLTRMLTFKFYMPKKATELKHLQCLEEELKPLEEVLNLAQSKNFHLRPRDLISNINVIVLELKGSETTFMCEYADETATIVEFLNRWITFEQSIISTLT

SEQ ID NO: 180 - protein, 367 aa, Artificial
  P-0468
DKTHTCPPCPAPEAAGAPSVFLFPPKPKDTLMISRTPEVTCVVVDVSHEDPEVKFNWYVDGVEVHNAKTKPREEQYNSTYRVVSVLTVLHQDWLNGKEYKCKVSNKALPAPIEKTISKAKGQPREPQVYTLPPSRDELTKNQVSLTCLVKGFYPSDIAVEWESNGQPENNYKTTPPVLDSDGSFFLYSKLTVDKSRWQQGNVFSCSVMHEALHNHYTQKSLSLSPGGGGSGGGSAPTSSSTKKTQLQLEHLLYDLQMILNGINNYKNPKLTRMLTFKFYMPKKATELKHLQCLEEELKPLEEVLNLAQSKNFHLRPRDLISNINVIVLELKGSETTFMCEYADETATIVEFLNRWITFKQSIISTLT

SEQ ID NO: 181 - protein, 367 aa, Artificial
  P-0469
DKTHTCPPCPAPEAAGAPSVFLFPPKPKDTLMISRTPEVTCVVVDVSHEDPEVKFNWYVDGVEVHNAKTKPREEQYNSTYRVVSVLTVLHQDWLNGKEYKCKVSNKALPAPIEKTISKAKGQPREPQVYTLPPSRDELTKNQVSLTCLVKGFYPSDIAVEWESNGQPENNYKTTPPVLDSDGSFFLYSKLTVDKSRWQQGNVFSCSVMHEALHNHYTQKSLSLSPGGGGSGGGSAPTSSSTKKTQLQLEHLLYDLQMILNGINNYKNPKLTRMLTFKFYMPKKATELKHLQCLEEELKPLEEVLNLAQSKNFHLRPRDLISNINVIVLELKGSETTFMCEYADETATIVEFLNRWITFHQSIISTLT

SEQ ID NO: 182 - protein, 367 aa, Artificial
  P-0470
DKTHTCPPCPAPEAAGAPSVFLFPPKPKDTLMISRTPEVTCVVVDVSHEDPEVKFNWYVDGVEVHNAKTKPREEQYNSTYRVVSVLTVLHQDWLNGKEYKCKVSNKALPAPIEKTISKAKGQPREPQVYTLPPSRDELTKNQVSLTCLVKGFYPSDIAVEWESNGQPENNYKTTPPVLDSDGSFFLYSKLTVDKSRWQQGNVFSCSVMHEALHNHYTQKSLSLSPGGGGSGGGSAPTSSSTKKTQLQLEHLLYDLQMILNGINNYKNPKLTRMLTFKFYMPKKATELKHLQCLEEELKPLEEVLNLAQSKNFHLRPRDLISNINVIVLELKGSETTFMCEYADETATIVEFLNRWITFWQSIISTLT

SEQ ID NO: 183 - protein, 367 aa, Artificial
  P-0471
DKTHTCPPCPAPEAAGAPSVFLFPPKPKDTLMISRTPEVTCVVVDVSHEDPEVKFNWYVDGVEVHNAKTKPREEQYNSTYRVVSVLTVLHQDWLNGKEYKCKVSNKALPAPIEKTISKAKGQPREPQVYTLPPSRDELTKNQVSLTCLVKGFYPSDIAVEWESNGQPENNYKTTPPVLDSDGSFFLYSKLTVDKSRWQQGNVFSCSVMHEALHNHYTQKSLSLSPGGGGSGGGSAPTSSSTKKTQLQLEHLLYDLQMILNGINNYKNPKLTRMLTFKFYMPKKATELKHLQCLEEELKPLEEVLNLAQSKNFHLRPRDLISNINVIVLELKGSETTFMCEYADETATIVEFLNRWITFIQSIISTLT

SEQ ID NO: 184 - protein, 367 aa, Artificial
  P-0472
DKTHTCPPCPAPEAAGAPSVFLFPPKPKDTLMISRTPEVTCVVVDVSHEDPEVKFNWYVDGVEVHNAKTKPREEQYNSTYRVVSVLTVLHQDWLNGKEYKCKVSNKALPAPIEKTISKAKGQPREPQVYTLPPSRDELTKNQVSLTCLVKGFYPSDIAVEWESNGQPENNYKTTPPVLDSDGSFFLYSKLTVDKSRWQQGNVFSCSVMHEALHNHYTQKSLSLSPGGGGSGGGSAPTSSSTKKTQLQLEHLLYDLNMILNGINNYKNPKLTRMLTFKFYMPKKATELKHLQCLEEELKPLEEVLNLAQSKNFHLRPRDLISNINVIVLELKGSETTFMCEYADETATIVEFLNRWITFSQSIISTLT

SEQ ID NO: 185 - protein, 367 aa, Artificial
  P-0473
DKTHTCPPCPAPEAAGAPSVFLFPPKPKDTLMISRTPEVTCVVVDVSHEDPEVKFNWYVDGVEVHNAKTKPREEQYNSTYRVVSVLTVLHQDWLNGKEYKCKVSNKALPAPIEKTISKAKGQPREPQVYTLPPSRDELTKNQVSLTCLVKGFYPSDIAVEWESNGQPENNYKTTPPVLDSDGSFFLYSKLTVDKSRWQQGNVFSCSVMHEALHNHYTQKSLSLSPGGGGSGGGSAPTSSSTKKTQLQLEHLLYDLHMILNGINNYKNPKLTRMLTFKFYMPKKATELKHLQCLEEELKPLEEVLNLAQSKNFHLRPRDLISNINVIVLELKGSETTFMCEYADETATIVEFLNRWITFSQSIISTLT

SEQ ID NO: 186 - protein, 367 aa, Artificial
  P-0474
DKTHTCPPCPAPEAAGAPSVFLFPPKPKDTLMISRTPEVTCVVVDVSHEDPEVKFNWYVDGVEVHNAKTKPREEQYNSTYRVVSVLTVLHQDWLNGKEYKCKVSNKALPAPIEKTISKAKGQPREPQVYTLPPSRDELTKNQVSLTCLVKGFYPSDIAVEWESNGQPENNYKTTPPVLDSDGSFFLYSKLTVDKSRWQQGNVFSCSVMHEALHNHYTQKSLSLSPGGGGSGGGSAPTSSSTKKTQLQLEHLLYDLKMILNGINNYKNPKLTRMLTFKFYMPKKATELKHLQCLEEELKPLEEVLNLAQSKNFHLRPRDLISNINVIVLELKGSETTFMCEYADETATIVEFLNRWITFSQSIISTLT

SEQ ID NO: 187 - protein, 367 aa, Artificial
  P-0475
DKTHTCPPCPAPEAAGAPSVFLFPPKPKDTLMISRTPEVTCVVVDVSHEDPEVKFNWYVDGVEVHNAKTKPREEQYNSTYRVVSVLTVLHQDWLNGKEYKCKVSNKALPAPIEKTISKAKGQPREPQVYTLPPSRDELTKNQVSLTCLVKGFYPSDIAVEWESNGQPENNYKTTPPVLDSDGSFFLYSKLTVDKSRWQQGNVFSCSVMHEALHNHYTQKSLSLSPGGGGSGGGSAPTSSSTKKTQLQLEHLLYDLYMILNGINNYKNPKLTRMLTFKFYMPKKATELKHLQCLEEELKPLEEVLNLAQSKNFHLRPRDLISNINVIVLELKGSETTFMCEYADETATIVEFLNRWITFSQSIISTLT

SEQ ID NO: 188 - protein, 367 aa, Artificial
  P-0476
DKTHTCPPCPAPEAAGAPSVFLFPPKPKDTLMISRTPEVTCVVVDVSHEDPEVKFNWYVDGVEVHNAKTKPREEQYNSTYRVVSVLTVLHQDWLNGKEYKCKVSNKALPAPIEKTISKAKGQPREPQVYTLPPSRDELTKNQVSLTCLVKGFYPSDIAVEWESNGQPENNYKTTPPVLDSDGSFFLYSKLTVDKSRWQQGNVFSCSVMHEALHNHYTQKSLSLSPGGGGSGGGSAPTSSSTKKTQLQLEHLLYDLIMILNGINNYKNPKLTRMLTFKFYMPKKATELKHLQCLEEELKPLEEVLNLAQSKNFHLRPRDLISNINVIVLELKGSETTFMCEYADETATIVEFLNRWITFSQSIISTLT

SEQ ID NO: 189 - protein, 367 aa, Artificial
  P-0480
DKTHTCPPCPAPEAAGAPSVFLFPPKPKDTLMISRTPEVTCVVVDVSHEDPEVKFNWYVDGVEVHNAKTKPREEQYNSTYRVVSVLTVLHQDWLNGKEYKCKVSNKALPAPIEKTISKAKGQPREPQVYTLPPSRDELTKNQVSLTCLVKGFYPSDIAVEWESNGQPENNYKTTPPVLDSDGSFFLYSKLTVDKSRWQQGNVFSCSVMHEALHNHYTQKSLSLSPGGGGSGGGSAPTSSSTKKTQLQLEHLLHDLQMILNGINNYKNPKLTRMLTFKFYMPKKATELKHLQCLEEELKPLEEVLNLAQSKNFHLRPRDLISNINVIVLELKGSETTFMCEYADETATIVEFLNRWITFSKSIISTLT

SEQ ID NO: 190 - protein, 367 aa, Artificial
  P-0491
DKTHTCPPCPAPEAAGAPSVFLFPPKPKDTLMISRTPEVTCVVVDVSHEDPEVKFNWYVDGVEVHNAKTKPREEQYNSTYRVVSVLTVLHQDWLNGKEYKCKVSNKALPAPIEKTISKAKGQPREPQVYTLPPSRDELTKNQVSLTCLVKGFYPSDIAVEWESNGQPENNYKTTPPVLDSDGSFFLYSKLTVDKSRWQQGNVFSCSVMHEALHNHYTQKSLSLSPGGGGSGGGSAPTSSSTKKTQLQLEHLLHDLQMILNGINNYKNPKLTRMLTFKFYMPKKATELKHLQCLEEELKPLEEVLNLAQSKNFHLRPRDLISNINVIVLELKGSETTFMCEYADETATIVEFLNRWITFIQSIISTLT

SEQ ID NO: 191 - protein, 367 aa, Artificial
  P-0492
DKTHTCPPCPAPEAAGAPSVFLFPPKPKDTLMISRTPEVTCVVVDVSHEDPEVKFNWYVDGVEVHNAKTKPREEQYNSTYRVVSVLTVLHQDWLNGKEYKCKVSNKALPAPIEKTISKAKGQPREPQVYTLPPSRDELTKNQVSLTCLVKGFYPSDIAVEWESNGQPENNYKTTPPVLDSDGSFFLYSKLTVDKSRWQQGNVFSCSVMHEALHNHYTQKSLSLSPGGGGSGGGSAPTSSSTKKTQLQLEHLLDDLQMILNGINNYKNPKLTRMLTFKFYMPKKATELKHLQCLEEELKPLEEVLNLAQSKNFHLRPRDLISNINVIVLELKGSETTFMCEYADETATIVEFLNRWITFIQSIISTLT

SEQ ID NO: 192 - protein, 367 aa, Artificial
  P-0493
DKTHTCPPCPAPEAAGAPSVFLFPPKPKDTLMISRTPEVTCVVVDVSHEDPEVKFNWYVDGVEVHNAKTKPREEQYNSTYRVVSVLTVLHQDWLNGKEYKCKVSNKALPAPIEKTISKAKGQPREPQVYTLPPSRDELTKNQVSLTCLVKGFYPSDIAVEWESNGQPENNYKTTPPVLDSDGSFFLYSKLTVDKSRWQQGNVFSCSVMHEALHNHYTQKSLSLSPGGGGSGGGSAPTSSSTKKTQLQLEHLLLELQMILNGINNYKNPKLTRMLTFKFYMPKKATELKHLQCLEEELKPLEEVLNLAQSKNFHLRPRDLISNINVIVLELKGSETTFMCEYADETATIVEFLNRWITFIQSIISTLT

SEQ ID NO: 193 - protein, 367 aa, Artificial
  P-0494
DKTHTCPPCPAPEAAGAPSVFLFPPKPKDTLMISRTPEVTCVVVDVSHEDPEVKFNWYVDGVEVHNAKTKPREEQYNSTYRVVSVLTVLHQDWLNGKEYKCKVSNKALPAPIEKTISKAKGQPREPQVYTLPPSRDELTKNQVSLTCLVKGFYPSDIAVEWESNGQPENNYKTTPPVLDSDGSFFLYSKLTVDKSRWQQGNVFSCSVMHEALHNHYTQKSLSLSPGGGGSGGGSAPTSSSTKKTQLQLEHLLLTLQMILNGINNYKNPKLTRMLTFKFYMPKKATELKHLQCLEEELKPLEEVLNLAQSKNFHLRPRDLISNINVIVLELKGSETTFMCEYADETATIVEFLNRWITFIQSIISTLT

SEQ ID NO: 194 - protein, 367 aa, Artificial
  P-0495
DKTHTCPPCPAPEAAGAPSVFLFPPKPKDTLMISRTPEVTCVVVDVSHEDPEVKFNWYVDGVEVHNAKTKPREEQYNSTYRVVSVLTVLHQDWLNGKEYKCKVSNKALPAPIEKTISKAKGQPREPQVYTLPPSRDELTKNQVSLTCLVKGFYPSDIAVEWESNGQPENNYKTTPPVLDSDGSFFLYSKLTVDKSRWQQGNVFSCSVMHEALHNHYTQKSLSLSPGGGGSGGGSAPTSSSTKKTQLQLEHLLYDLQMILNGINNYKNPKLTRMLTFKFYMPKKATELKHLQCLEEELKPLEEVLNLAQSKNFHLRPRDLISNINVIVLELKGSETTFMCEYADETATIVEFLNRWITFIESIISTLT

SEQ ID NO: 195 - protein, 374 aa, Artificial
  P-0496 (Benchmark-2)
APTSSSTKKTQLQLEHLLLDLQMILNGINNYKNPKLTRMLTFKFYMPKKATELKHLQCLEEELKPLEEVLNLAQSKNFHLRPRDLISRINVIVLELKGSETTFMCEYADETATIVEFLNRWITFSQSIISTLTGGGGSGGGGSGGGGSGGGGSCPPCPAPEAAGAPSVFLFPPKPKDTLMISRTPEVTCVVVDVSHEDPEVKFNWYVDGVEVHNAKTKPREEQYNSTYRVVSVLTVLHQDWLNGKEYKCKVSNKALPAPIEKTISKAKGQPREPQVYTLPPSRDELTKNQVSLTCLVKGFYPSDIAVEWESNGQPENNYKTTPPVLDSDGSFFLYSKLTVDKSRWQQGNVFSCSVMHEALHNHYTQKSLSLSPG

SEQ ID NO: 196 - protein, 367 aa, Artificial
  P-0482-Hole chain
DKTHTCPPCPAPEAAGAPSVFLFPPKPKDTLMISRTPEVTCVVVDVSHEDPEVKFNWYVDGVEVHNAKTKPREEQYNSTYRVVSVLTVLHQDWLNGKEYKCKVSNKALPAPIEKTISKAKGQPREPQVYTLPPCREEMTKNQVSLSCAVKGFYPSDIAVEWESNGQPENNYKTTPPVLDSDGSFFLVSKLTVDKSRWQQGNVFSCSVMHEALHNHYTQKSLSLSPGGGGSGGGSAPTSSSTKKTQLQLEHLLLDLQMILNGINNYKNPKLTRMLTFKFYMPKKATELKHLQCLEEELKPLEEVLNLAQSKNFHLRPRDLISNINVIVLELKGSETTFMCEYADETATIVEFLNRWITFSQSIISTLT

SEQ ID NO: 197 - protein, 405 aa, Artificial
  P-0482-Knob chain
DKTHTCPPCPAPEAAGAPSVFLFPPKPKDTLMISRTPEVTCVVVDVSHEDPEVKFNWYVDGVEVHNAKTKPREEQYNSTYRVVSVLTVLHQDWLNGKEYKCKVSNKALPAPIEKTISKAKGQPREPQVCTLPPSREEMTKNQVSLWCLVKGFYPSDIAVEWESNGQPENNYKTTPPVLDSDGSFFLYSKLTVDKSRWQQGNVFSCSVMHEALHNHYTQKSLSLSPGGGGGSGGGGSGGGGSELCDDDPPEIPHATFKAMAYKEGTMLNCECKRGFRRIKSGSLYMLCTGNSSHSSWDNQCQCTSSATRNTTKQVTPQPEEQKERKTTEMQSPMQPVDQASLPGHCREPPPWENEATERIYHFVVGQMVYYQCVQGYRALHRGPAESVCKMTHGKTRWTQPQLICT

SEQ ID NO: 198 - protein, 367 aa, Artificial
  Benchmark-1
DKTHTCPPCPAPEAAGAPSVFLFPPKPKDTLMISRTPEVTCVVVDVSHEDPEVKFNWYVDGVEVHNAKTKPREEQYNSTYRVVSVLTVLHQDWLNGKEYKCKVSNKALPAPIEKTISKAKGQPREPQVYTLPPSRDELTKNQVSLTCLVKGFYPSDIAVEWESNGQPENNYKTTPPVLDSDGSFFLYSKLTVDKSRWQQGNVFSCSVMHEALHNHYTQKSLSLSPGGGGSGGGSAPTSSSTKKTQLQLEHLLLDLQMILNGINNYKNPKLTRMLTFKFYMPKKATELKHLQCLEEELKPLEEVLNLAQSKNFHLRPRDLISNINKIVLELKGSETTFMCEYADETATIVEFLNRWITFSQSIISTLT

SEQ ID NO: 199 - protein, 367 aa, Artificial
  Benchmark-3
DKTHTCPPCPAPEAAGAPSVFLFPPKPKDTLMISRTPEVTCVVVDVSHEDPEVKFNWYVDGVEVHNAKTKPREEQYNSTYRVVSVLTVLHQDWLNGKEYKCKVSNKALPAPIEKTISKAKGQPREPQVYTLPPSRDELTKNQVSLTCLVKGFYPSDIAVEWESNGQPENNYKTTPPVLDSDGSFFLYSKLTVDKSRWQQGNVFSCSVMHEALHNHYTQKSLSLSPGGGGSGGGSAPTSSSTKKTQLQLEHLLLDLQMILNGINNYKNPKLTRMLTFKFYMPKKATELKHLQCLEEELKPLEEVLNLAQSKNFHLRPRDLISDINVIVLELKGSETTFMCEYADETATIVEFLNRWITFSQSIISTLT

SEQ ID NO: 200 - protein, 591 aa, Artificial
  Vedolizumab-IL-2-variant-fusion-HC
QVQLVQSGAEVKKPGASVKVSCKGSGYTFTSYWMHWVRQAPGQRLEWIGEIDPSESNTNYNQKFKGRVTLTVDISASTAYMELSSLRSEDTAVYYCARGGYDGWDYAIDYWGQGTLVTVSSASTKGPSVFPLAPSSKSTSGGTAALGCLVKDYFPEPVTVSWNSGALTSGVHTFPAVLQSSGLYSLSSVVTVPSSSLGTQTYICNVNHKPSNTKVDKKVEPKSCDKTHTCPPCPAPELAGAPSVFLFPPKPKDTLMISRTPEVTCVVVDVSHEDPEVKFNWYVDGVEVHNAKTKPREEQYNSTYRVVSVLTVLHQDWLNGKEYKCKVSNKALPAPIEKTISKAKGQPREPQVYTLPPSRDELTKNQVSLTCLVKGFYPSDIAVEWESNGQPENNYKTTPPVLDSDGSFFLYSKLTVDKSRWQQGNVFSCSVMHEALHNHYTQKSLSLSPGGGGSGGGSAPTSSSTKKTQLQLEHLLHDLQMILNGINNYKNPKLTRMLTFKFYMPKKATELKHLQCLEEELKPLEEVLNLAQSKNFHLRPRDLISNINVIVLELKGSETTFMCEYADETATIVEFLNRWITFIESIISTLT

SEQ ID NO: 201 - protein, 219 aa, Artificial
  Vedolizumab-L
DVVMTQSPLSLPVTPGEPASISCRSSQSLAKSYGNTYLSWYLQKPGQSPQLLIYGISNRFSGVPDRFSGSGSGTDFTLKISRVEAEDVGVYYCLQGTHQPYTFGQGTKVEIKRTVAAPSVFIFPPSDEQLKSGTASVVCLLNNFYPREAKVQWKVDNALQSGNSQESVTEQDSKDSTYSLSSTLTLSKADYEKHKVYACEVTHQGLSSPVTKSFNRGEC

SEQ ID NO: 202 - protein, 591 aa, Artificial
  Humira-IL-2-variant-fusion-HC
EVQLVESGGGLVQPGRSLRLSCAASGFTFDDYAMHWVRQAPGKGLEWVSAITWNSGHIDYADSVEGRFTISRDNAKNSLYLQMNSLRAEDTAVYYCAKVSYLSTASSLDYWGQGTLVTVSSASTKGPSVFPLAPSSKSTSGGTAALGCLVKDYFPEPVTVSWNSGALTSGVHTFPAVLQSSGLYSLSSVVTVPSSSLGTQTYICNVNHKPSNTKVDKKVEPKSCDKTHTCPPCPAPELLGGPSVFLFPPKPKDTLMISRTPEVTCVVVDVSHEDPEVKFNWYVDGVEVHNAKTKPREEQYNSTYRVVSVLTVLHQDWLNGKEYKCKVSNKALPAPIEKTISKAKGQPREPQVYTLPPSRDELTKNQVSLTCLVKGFYPSDIAVEWESNGQPENNYKTTPPVLDSDGSFFLYSKLTVDKSRWQQGNVFSCSVMHEALHNHYTQKSLSLSPGGGGSGGGSAPTSSSTKKTQLQLEHLLHDLQMILNGINNYKNPKLTRMLTFKFYMPKKATELKHLQCLEEELKPLEEVLNLAQSKNFHLRPRDLISNINVIVLELKGSETTFMCEYADETATIVEFLNRWITFIESIISTLT

SEQ ID NO: 203 - protein, 214 aa, Artificial
  Humira-L
DIQMTQSPSSLSASVGDRVTITCRASQGIRNYLAWYQQKPGKAPKLLIYAASTLQSGVPSRFSGSGSGTDFTLTISSLQPEDVATYYCQRYNRAPYTFGQGTKVEIKRTVAAPSVFIFPPSDEQLKSGTASVVCLLNNFYPREAKVQWKVDNALQSGNSQESVTEQDSKDSTYSLSSTLTLSKADYEKHKVYACEVTHQGLSSPVTKSFNRGEC

SEQ ID NO: 204 - protein, 590 aa, Artificial
  PF-00547659-IL-2-variant-HC
QVQLVQSGAEVKKPGASVKVSCKASGYTFTSYGINWVRQAPGQGLEWMGWISVYSGNTNYAQKVQGRVTMTADTSTSTAYMDLRSLRSDDTAVYYCAREGSSSSGDYYYGMDVWGQGTTVTVSSASTKGPSVFPLAPCSRSTSESTAALGCLVKDYFPEPVTVSWNSGALTSGVHTFPAVLQSSGLYSLSSVVTVPSSNFGTQTYTCNVDHKPSNTKVDKTVERKCCVECPPCPAPPVAGPSVFLFPPKPKDTLMISRTPEVTCVVVDVSHEDPEVQFNWYVDGVEVHNAKTKPREEQFNSTFRVVSVLTVVHQDWLNGKEYKCKVSNKGLPAPIEKTISKTKGQPREPQVYTLPPSREEMTKNQVSLTCLVKGFYPSDIAVEWESNGQPENNYKTTPPMLDSDGSFFLYSKLTVDKSRWQQGNVFSCSVMHEALHNHYTQKSLSLSPGGGGSGGGSAPTSSSTKKTQLQLEHLLYDLQMILNGINNYKNPKLTRMLTFKFYMPKKATELKHLQCLEEELKPLEEVLNLAQSKNFHLRPRDLISNINVIVLELKGSETTFMCEYADETATIVEFLNRWITFIESIISTLT

SEQ ID NO: 205 - protein, 219 aa, Artificial
  PF-00547659-L
DIVMTQTPLSLSVTPGQPASISCKSSQSLLHTDGTTYLYWYLQKPGQPPQLLIYEVSNRFSGVPDRFSGSGSGTDFTLKISRVEAEDVGIYYCMQNIQLPWTFGQGTKVEIKRTVAAPSVFIFPPSDEQLKSGTASVVCLLNNFYPREAKVQWKVDNALQSGNSQESVTEQDSKDSTYSLSSTLTLSKADYEKHKVYACEVTHQGLSSPVTKSFNRGEC

SEQ ID NO: 206 - protein, 587 aa, Artificial
  Etrolizumab-IL-2-variant-HC
EVQLVESGGGLVQPGGSLRLSCSVTGFFITNNYWGWVRQAPGKGLEWVGYISYSGSTSYNPSLKSRFTISRDNSKNTFYLQMNSLRAEDTAVYYCAMTGSSGYFDFWGQGTLVTVSSASTKGPSVFPLAPSSKSTSGGTAALGCLVKDYFPEPVTVSWNSGALTSGVHTFPAVLQSSGLYSLSSVVTVPSSSLGTQTYICNVNHKPSNTKVDKKVEPKSCDKTHTCPPCPAPELLGGPSVFLFPPKPKDTLMISRTPEVTCVVVDVSHEDPEVKFNWYVDGVEVHNAKTKPREEQYNSTYRVVSVLTVLHQDWLNGKEYKCKVSNKALPAPIEKTISKAKGQPREPQVYTLPPSRDELTKNQVSLTCLVKGFYPSDIAVEWESNGQPENNYKTTPPVLDSDGSFFLYSKLTVDKSRWQQGNVFSCSVMHEALHNHYTQKSLSLSPGGGGSGGGSAPTSSSTKKTQLQLEHLLYDLQMILNGINNYKNPKLTRMLTFKFYMPKKATELKHLQCLEEELKPLEEVLNLAQSKNFHLRPRDLISNINVIVLELKGSETTFMCEYADETATIVEFLNRWITFIESIISTLT

SEQ ID NO: 207 - protein, 214 aa, Artificial
  Etrolizumab-L
DIQMTQSPSSLSASVGDRVTITCRASESVDDLLHWYQQKPGKAPKLLIKYASQSISGVPSRFSGSGSGTDFTLTISSLQPEDFATYYCQQGNSLPNTFGQGTKVEIKRTVAAPSVFIFPPSDEQLKSGTASVVCLLNNFYPREAKVQWKVDNALQSGNSQESVTEQDSKDSTYSLSSTLTLSKADYEKHKVYACEVTHQGLSSPVTKSFNRGEC

SEQ ID NO: 208 - protein, 133 aa, Artificial
  IL-2 L19H/S125I/Q126E variant sequence
APTSSSTKKTQLQLEHLLHDLQMILNGINNYKNPKLTRMLTFKFYMPKKATELKHLQCLEEELKPLEEVLNLAQSKNFHLRPRDLISNINVIVLELKGSETTFMCEYADETATIVEFLNRWITFIESIISTLT

SEQ ID NO: 209 - protein, 133 aa, Artificial
  IL-2 L19H/S125I/Q126K variant sequence
APTSSSTKKTQLQLEHLLHDLQMILNGINNYKNPKLTRMLTFKFYMPKKATELKHLQCLEEELKPLEEVLNLAQSKNFHLRPRDLISNINVIVLELKGSETTFMCEYADETATIVEFLNRWITFIKSIISTLT

SEQ ID NO: 210 - protein, 133 aa, Artificial
  IL-2 L19Q/Q126K variant sequence
APTSSSTKKTQLQLEHLLQDLQMILNGINNYKNPKLTRMLTFKFYMPKKATELKHLQCLEEELKPLEEVLNLAQSKNFHLRPRDLISNINVIVLELKGSETTFMCEYADETATIVEFLNRWITFSKSIISTLT

SEQ ID NO: 211 - protein, 133 aa, Artificial
  IL-2 L19Q/S125I/Q126E variant sequence
APTSSSTKKTQLQLEHLLQDLQMILNGINNYKNPKLTRMLTFKFYMPKKATELKHLQCLEEELKPLEEVLNLAQSKNFHLRPRDLISNINVIVLELKGSETTFMCEYADETATIVEFLNRWITFIESIISTLT

SEQ ID NO: 212 - protein, 133 aa, Artificial
  IL-2 L19Q/S125I/Q126K variant sequence
APTSSSTKKTQLQLEHLLQDLQMILNGINNYKNPKLTRMLTFKFYMPKKATELKHLQCLEEELKPLEEVLNLAQSKNFHLRPRDLISNINVIVLELKGSETTFMCEYADETATIVEFLNRWITFIKSIISTLT

SEQ ID NO: 213 - protein, 367 aa, Artificial
  P-0511
DKTHTCPPCPAPEAAGAPSVFLFPPKPKDTLMISRTPEVTCVVVDVSHEDPEVKFNWYVDGVEVHNAKTKPREEQYNSTYRVVSVLTVLHQDWLNGKEYKCKVSNKALPAPIEKTISKAKGQPREPQVYTLPPSRDELTKNQVSLTCLVKGFYPSDIAVEWESNGQPENNYKTTPPVLDSDGSFFLYSKLTVDKSRWQQGNVFSCSVMHEALHNHYTQKSLSLSPGGGGSGGGSAPTSSSTKKTQLQLEHLLHDLQMILNGINNYKNPKLTRMLTFKFYMPKKATELKHLQCLEEELKPLEEVLNLAQSKNFHLRPRDLISNINVIVLELKGSETTFMCEYADETATIVEFLNRWITFIESIISTLT

SEQ ID NO: 214 - protein, 367 aa, Artificial
  P-0512
DKTHTCPPCPAPEAAGAPSVFLFPPKPKDTLMISRTPEVTCVVVDVSHEDPEVKFNWYVDGVEVHNAKTKPREEQYNSTYRVVSVLTVLHQDWLNGKEYKCKVSNKALPAPIEKTISKAKGQPREPQVYTLPPSRDELTKNQVSLTCLVKGFYPSDIAVEWESNGQPENNYKTTPPVLDSDGSFFLYSKLTVDKSRWQQGNVFSCSVMHEALHNHYTQKSLSLSPGGGGSGGGSAPTSSSTKKTQLQLEHLLHDLQMILNGINNYKNPKLTRMLTFKFYMPKKATELKHLQCLEEELKPLEEVLNLAQSKNFHLRPRDLISNINVIVLELKGSETTFMCEYADETATIVEFLNRWITFIKSIISTLT

SEQ ID NO: 215 - protein, 367 aa, Artificial
  P-0513
DKTHTCPPCPAPEAAGAPSVFLFPPKPKDTLMISRTPEVTCVVVDVSHEDPEVKFNWYVDGVEVHNAKTKPREEQYNSTYRVVSVLTVLHQDWLNGKEYKCKVSNKALPAPIEKTISKAKGQPREPQVYTLPPSRDELTKNQVSLTCLVKGFYPSDIAVEWESNGQPENNYKTTPPVLDSDGSFFLYSKLTVDKSRWQQGNVFSCSVMHEALHNHYTQKSLSLSPGGGGSGGGSAPTSSSTKKTQLQLEHLLQDLQMILNGINNYKNPKLTRMLTFKFYMPKKATELKHLQCLEEELKPLEEVLNLAQSKNFHLRPRDLISNINVIVLELKGSETTFMCEYADETATIVEFLNRWITFSKSIISTLT

SEQ ID NO: 216 - protein, 367 aa, Artificial
  P-0514
DKTHTCPPCPAPEAAGAPSVFLFPPKPKDTLMISRTPEVTCVVVDVSHEDPEVKFNWYVDGVEVHNAKTKPREEQYNSTYRVVSVLTVLHQDWLNGKEYKCKVSNKALPAPIEKTISKAKGQPREPQVYTLPPSRDELTKNQVSLTCLVKGFYPSDIAVEWESNGQPENNYKTTPPVLDSDGSFFLYSKLTVDKSRWQQGNVFSCSVMHEALHNHYTQKSLSLSPGGGGSGGGSAPTSSSTKKTQLQLEHLLQDLQMILNGINNYKNPKLTRMLTFKFYMPKKATELKHLQCLEEELKPLEEVLNLAQSKNFHLRPRDLISNINVIVLELKGSETTFMCEYADETATIVEFLNRWITFIESIISTLT

SEQ ID NO: 217 - protein, 367 aa, Artificial
  P-0515
DKTHTCPPCPAPEAAGAPSVFLFPPKPKDTLMISRTPEVTCVVVDVSHEDPEVKFNWYVDGVEVHNAKTKPREEQYNSTYRVVSVLTVLHQDWLNGKEYKCKVSNKALPAPIEKTISKAKGQPREPQVYTLPPSRDELTKNQVSLTCLVKGFYPSDIAVEWESNGQPENNYKTTPPVLDSDGSFFLYSKLTVDKSRWQQGNVFSCSVMHEALHNHYTQKSLSLSPGGGGSGGGSAPTSSSTKKTQLQLEHLLQDLQMILNGINNYKNPKLTRMLTFKFYMPKKATELKHLQCLEEELKPLEEVLNLAQSKNFHLRPRDLISNINVIVLELKGSETTFMCEYADETATIVEFLNRWITFIKSIISTLT

SEQ ID NO: 218 - protein, 367 aa, Artificial
  P-0585
DKTHTCPPCPAPEAAGGPSVFLFPPKPKDTLYITREPEVTCVVVDVSHEDPEVKFNWYVDGVEVHNAKTKPREEQYNSTYRVVSVLTVLHQDWLNGKEYKCKVSNKALPAPIEKTISKAKGQPREPQVYTLPPSREEMTKNQVSLTCLVKGFYPSDIAVEWESNGQPENNYKTTPPVLDSDGSFFLYSKLTVDKSRWQQGNVFSCSVMHEALHNHYTQKSLSLSPGGGGSGGGSAPTSSSTKKTQLQLEHLLHDLQMILNGINNYKNPKLTRMLTFKFYMPKKATELKHLQCLEEELKPLEEVLNLAQSKNFHLRPRDLISNINVIVLELKGSETTFMCEYADETATIVEFLNRWITFIESIISTLT

SEQ ID NO: 219 - protein, 367 aa, Artificial
  P-0616
DKTHTCPPCPAPEAAGAPSVFLFPPKPKDTLMISRTPEVTCVVVDVSHEDPEVKFNWYVDGVEVHNAKTKPREEQYNSTYRVVSVLTVLHQDWLNGKEYKCKVSNKALPAPIEKTISKAKGQPREPQVYTLPPSRDELTKNQVSLTCLVKGFYPSDIAVEWESNGQPENNYKTTPPVLDSDGSFFLYSKLTVDKSRWQQGNVFSCSVMHEALHAHYTQKSLSLSPGGGGSGGGSAPTSSSTKKTQLQLEHLLHDLQMILNGINNYKNPKLTRMLTFKFYMPKKATELKHLQCLEEELKPLEEVLNLAQSKNFHLRPRDLISNINVIVLELKGSETTFMCEYADETATIVEFLNRWITFIESIISTLT

SEQ ID NO: 220 - protein, 133 aa, Artificial
  IL-2 R38E/F42A/S125I variant sequence
APTSSSTKKTQLQLEHLLLDLQMILNGINNYKNPKLTEMLTAKFYMPKKATELKHLQCLEEELKPLEEVLNLAQSKNFHLRPRDLISNINVIVLELKGSETTFMCEYADETATIVEFLNRWITFIQSIISTLT

SEQ ID NO: 221 - protein, 133 aa, Artificial
  IL-2 R38A/S125I variant sequence
APTSSSTKKTQLQLEHLLLDLQMILNGINNYKNPKLTAMLTFKFYMPKKATELKHLQCLEEELKPLEEVLNLAQSKNFHLRPRDLISNINVIVLELKGSETTFMCEYADETATIVEFLNRWITFIQSIISTLT

SEQ ID NO: 222 - protein, 133 aa, Artificial
  IL-2 T41A/S125I variant sequence
APTSSSTKKTQLQLEHLLLDLQMILNGINNYKNPKLTRMLAFKFYMPKKATELKHLQCLEEELKPLEEVLNLAQSKNFHLRPRDLISNINVIVLELKGSETTFMCEYADETATIVEFLNRWITFIQSIISTLT

SEQ ID NO: 223 - protein, 133 aa, Artificial
  IL-2 T41G/S125I variant sequence
APTSSSTKKTQLQLEHLLLDLQMILNGINNYKNPKLTRMLGFKFYMPKKATELKHLQCLEEELKPLEEVLNLAQSKNFHLRPRDLISNINVIVLELKGSETTFMCEYADETATIVEFLNRWITFIQSIISTLT

SEQ ID NO: 224 - protein, 133 aa, Artificial
  IL-2 T41V/S125I variant sequence
APTSSSTKKTQLQLEHLLLDLQMILNGINNYKNPKLTRMLVFKFYMPKKATELKHLQCLEEELKPLEEVLNLAQSKNFHLRPRDLISNINVIVLELKGSETTFMCEYADETATIVEFLNRWITFIQSIISTLT

SEQ ID NO: 225 - protein, 133 aa, Artificial
  IL-2 F44G/S125I variant sequence
APTSSSTKKTQLQLEHLLLDLQMILNGINNYKNPKLTRMLTFKGYMPKKATELKHLQCLEEELKPLEEVLNLAQSKNFHLRPRDLISNINVIVLELKGSETTFMCEYADETATIVEFLNRWITFIQSIISTLT

SEQ ID NO: 226 - protein, 133 aa, Artificial
  IL-2 F44V/S125I variant sequence
APTSSSTKKTQLQLEHLLLDLQMILNGINNYKNPKLTRMLTFKVYMPKKATELKHLQCLEEELKPLEEVLNLAQSKNFHLRPRDLISNINVIVLELKGSETTFMCEYADETATIVEFLNRWITFIQSIISTLT

SEQ ID NO: 227 - protein, 133 aa, Artificial
  IL-2 P65G/S125I variant sequence
APTSSSTKKTQLQLEHLLLDLQMILNGINNYKNPKLTRMLTFKFYMPKKATELKHLQCLEEELKGLEEVLNLAQSKNFHLRPRDLISNINVIVLELKGSETTFMCEYADETATIVEFLNRWITFIQSIISTLT

SEQ ID NO: 228 - protein, 133 aa, Artificial
  IL-2 Y107G/S125I variant sequence
APTSSSTKKTQLQLEHLLLDLQMILNGINNYKNPKLTRMLTFKVYMPKKATELKHLQCLEEELKPLEEVLNLAQSKNFHLRPRDLISNINVIVLELKGSETTFMCEGADETATIVEFLNRWITFIQSIISTLT

SEQ ID NO: 229 - protein, 133 aa, Artificial
  IL-2 Y107H/S125I variant sequence
APTSSSTKKTQLQLEHLLLDLQMILNGINNYKNPKLTRMLTFKVYMPKKATELKHLQCLEEELKPLEEVLNLAQSKNFHLRPRDLISNINVIVLELKGSETTFMCEHADETATIVEFLNRWITFIQSIISTLT

SEQ ID NO: 230 - protein, 133 aa, Artificial
  IL-2 Y107L/S125I variant sequence
APTSSSTKKTQLQLEHLLLDLQMILNGINNYKNPKLTRMLTFKVYMPKKATELKHLQCLEEELKPLEEVLNLAQSKNFHLRPRDLISNINVIVLELKGSETTFMCELADETATIVEFLNRWITFIQSIISTLT

SEQ ID NO: 231 - protein, 133 aa, Artificial
  IL-2 Y107V/S125I variant sequence
APTSSSTKKTQLQLEHLLLDLQMILNGINNYKNPKLTRMLTFKVYMPKKATELKHLQCLEEELKPLEEVLNLAQSKNFHLRPRDLISNINVIVLELKGSETTFMCEVADETATIVEFLNRWITFIQSIISTLT

SEQ ID NO: 232 - protein, 133 aa, Artificial
  IL-2 R38A/P65G/S125I variant sequence
APTSSSTKKTQLQLEHLLLDLQMILNGINNYKNPKLTAMLTFKFYMPKKATELKHLQCLEEELKGLEEVLNLAQSKNFHLRPRDLISNINVIVLELKGSETTFMCEYADETATIVEFLNRWITFIQSIISTLT

SEQ ID NO: 233 - protein, 133 aa, Artificial
  IL-2 F42A/S125I variant sequence
APTSSSTKKTQLQLEHLLLDLQMILNGINNYKNPKLTRMLTAKFYMPKKATELKHLQCLEEELKPLEEVLNLAQSKNFHLRPRDLISNINVIVLELKGSETTFMCEYADETATIVEFLNRWITFIQSIISTLT

SEQ ID NO: 234 - protein, 133 aa, Artificial
  IL-2 R38E/S125I variant sequence
APTSSSTKKTQLQLEHLLLDLQMILNGINNYKNPKLTEMLTFKFYMPKKATELKHLQCLEEELKPLEEVLNLAQSKNFHLRPRDLISNINVIVLELKGSETTFMCEYADETATIVEFLNRWITFIQSIISTLT

SEQ ID NO: 235 - protein, 367 aa, Artificial
  P-0615
DKTHTCPPCPAPEAAGAPSVFLFPPKPKDTLMISRTPEVTCVVVDVSHEDPEVKFNWYVDGVEVHNAKTKPREEQYNSTYRVVSVLTVLHQDWLNGKEYKCKVSNKALPAPIEKTISKAKGQPREPQVYTLPPSRDELTKNQVSLTCLVKGFYPSDIAVEWESNGQPENNYKTTPPVLDSDGSFFLYSKLTVDKSRWQQGNVFSCSVMHEALHNHYTQKSLSLSPGGGGSGGGSAPTSSSTKKTQLQLEHLLLDLQMILNGINNYKNPKLTEMLTAKFYMPKKATELKHLQCLEEELKPLEEVLNLAQSKNFHLRPRDLISNINVIVLELKGSETTFMCEYADETATIVEFLNRWITFIQSIISTLT

SEQ ID NO: 236 - protein, 367 aa, Artificial
  P-0602
DKTHTCPPCPAPEAAGAPSVFLFPPKPKDTLMISRTPEVTCVVVDVSHEDPEVKFNWYVDGVEVHNAKTKPREEQYNSTYRVVSVLTVLHQDWLNGKEYKCKVSNKALPAPIEKTISKAKGQPREPQVYTLPPSRDELTKNQVSLTCLVKGFYPSDIAVEWESNGQPENNYKTTPPVLDSDGSFFLYSKLTVDKSRWQQGNVFSCSVMHEALHNHYTQKSLSLSPGGGGSGGGSAPTSSSTKKTQLQLEHLLLDLQMILNGINNYKNPKLTAMLTFKFYMPKKATELKHLQCLEEELKPLEEVLNLAQSKNFHLRPRDLISNINVIVLELKGSETTFMCEYADETATIVEFLNRWITFIQSIISTLT

SEQ ID NO: 237 - protein, 367 aa, Artificial
  P-0603
DKTHTCPPCPAPEAAGAPSVFLFPPKPKDTLMISRTPEVTCVVVDVSHEDPEVKFNWYVDGVEVHNAKTKPREEQYNSTYRVVSVLTVLHQDWLNGKEYKCKVSNKALPAPIEKTISKAKGQPREPQVYTLPPSRDELTKNQVSLTCLVKGFYPSDIAVEWESNGQPENNYKTTPPVLDSDGSFFLYSKLTVDKSRWQQGNVFSCSVMHEALHNHYTQKSLSLSPGGGGSGGGSAPTSSSTKKTQLQLEHLLLDLQMILNGINNYKNPKLTRMLAFKFYMPKKATELKHLQCLEEELKPLEEVLNLAQSKNFHLRPRDLISNINVIVLELKGSETTFMCEYADETATIVEFLNRWITFIQSIISTLT

SEQ ID NO: 238 - protein, 367 aa, Artificial
  P-0604
DKTHTCPPCPAPEAAGAPSVFLFPPKPKDTLMISRTPEVTCVVVDVSHEDPEVKFNWYVDGVEVHNAKTKPREEQYNSTYRVVSVLTVLHQDWLNGKEYKCKVSNKALPAPIEKTISKAKGQPREPQVYTLPPSRDELTKNQVSLTCLVKGFYPSDIAVEWESNGQPENNYKTTPPVLDSDGSFFLYSKLTVDKSRWQQGNVFSCSVMHEALHNHYTQKSLSLSPGGGGSGGGSAPTSSSTKKTQLQLEHLLLDLQMILNGINNYKNPKLTRMLGFKFYMPKKATELKHLQCLEEELKPLEEVLNLAQSKNFHLRPRDLISNINVIVLELKGSETTFMCEYADETATIVEFLNRWITFIQSIISTLT

SEQ ID NO: 239 - protein, 367 aa, Artificial
  P-0605
DKTHTCPPCPAPEAAGAPSVFLFPPKPKDTLMISRTPEVTCVVVDVSHEDPEVKFNWYVDGVEVHNAKTKPREEQYNSTYRVVSVLTVLHQDWLNGKEYKCKVSNKALPAPIEKTISKAKGQPREPQVYTLPPSRDELTKNQVSLTCLVKGFYPSDIAVEWESNGQPENNYKTTPPVLDSDGSFFLYSKLTVDKSRWQQGNVFSCSVMHEALHNHYTQKSLSLSPGGGGSGGGSAPTSSSTKKTQLQLEHLLLDLQMILNGINNYKNPKLTRMLVFKFYMPKKATELKHLQCLEEELKPLEEVLNLAQSKNFHLRPRDLISNINVIVLELKGSETTFMCEYADETATIVEFLNRWITFIQSIISTLT

SEQ ID NO: 240 - protein, 367 aa, Artificial
  P-0606
DKTHTCPPCPAPEAAGAPSVFLFPPKPKDTLMISRTPEVTCVVVDVSHEDPEVKFNWYVDGVEVHNAKTKPREEQYNSTYRVVSVLTVLHQDWLNGKEYKCKVSNKALPAPIEKTISKAKGQPREPQVYTLPPSRDELTKNQVSLTCLVKGFYPSDIAVEWESNGQPENNYKTTPPVLDSDGSFFLYSKLTVDKSRWQQGNVFSCSVMHEALHNHYTQKSLSLSPGGGGSGGGSAPTSSSTKKTQLQLEHLLLDLQMILNGINNYKNPKLTRMLTFKGYMPKKATELKHLQCLEEELKPLEEVLNLAQSKNFHLRPRDLISNINVIVLELKGSETTFMCEYADETATIVEFLNRWITFIQSIISTLT

SEQ ID NO: 241 - protein, 367 aa, Artificial
  P-0607
DKTHTCPPCPAPEAAGAPSVFLFPPKPKDTLMISRTPEVTCVVVDVSHEDPEVKFNWYVDGVEVHNAKTKPREEQYNSTYRVVSVLTVLHQDWLNGKEYKCKVSNKALPAPIEKTISKAKGQPREPQVYTLPPSRDELTKNQVSLTCLVKGFYPSDIAVEWESNGQPENNYKTTPPVLDSDGSFFLYSKLTVDKSRWQQGNVFSCSVMHEALHNHYTQKSLSLSPGGGGSGGGSAPTSSSTKKTQLQLEHLLLDLQMILNGINNYKNPKLTRMLTFKVYMPKKATELKHLQCLEEELKPLEEVLNLAQSKNFHLRPRDLISNINVIVLELKGSETTFMCEYADETATIVEFLNRWITFIQSIISTLT

SEQ ID NO: 242 - protein, 367 aa, Artificial
  P-0608
DKTHTCPPCPAPEAAGAPSVFLFPPKPKDTLMISRTPEVTCVVVDVSHEDPEVKFNWYVDGVEVHNAKTKPREEQYNSTYRVVSVLTVLHQDWLNGKEYKCKVSNKALPAPIEKTISKAKGQPREPQVYTLPPSRDELTKNQVSLTCLVKGFYPSDIAVEWESNGQPENNYKTTPPVLDSDGSFFLYSKLTVDKSRWQQGNVFSCSVMHEALHNHYTQKSLSLSPGGGGSGGGSAPTSSSTKKTQLQLEHLLLDLQMILNGINNYKNPKLTRMLTFKFYMPKKATELKHLQCLEEELKGLEEVLNLAQSKNFHLRPRDLISNINVIVLELKGSETTFMCEYADETATIVEFLNRWITFIQSIISTLT

SEQ ID NO: 243 - protein, 367 aa, Artificial
  P-0609
DKTHTCPPCPAPEAAGAPSVFLFPPKPKDTLMISRTPEVTCVVVDVSHEDPEVKFNWYVDGVEVHNAKTKPREEQYNSTYRVVSVLTVLHQDWLNGKEYKCKVSNKALPAPIEKTISKAKGQPREPQVYTLPPSRDELTKNQVSLTCLVKGFYPSDIAVEWESNGQPENNYKTTPPVLDSDGSFFLYSKLTVDKSRWQQGNVFSCSVMHEALHNHYTQKSLSLSPGGGGSGGGSAPTSSSTKKTQLQLEHLLLDLQMILNGINNYKNPKLTRMLTFKFYMPKKATELKHLQCLEEELKPLEEVLNLAQSKNFHLRPRDLISNINVIVLELKGSETTFMCEGADETATIVEFLNRWITFIQSIISTLT

SEQ ID NO: 244 - protein, 367 aa, Artificial
  P-0610
DKTHTCPPCPAPEAAGAPSVFLFPPKPKDTLMISRTPEVTCVVVDVSHEDPEVKFNWYVDGVEVHNAKTKPREEQYNSTYRVVSVLTVLHQDWLNGKEYKCKVSNKALPAPIEKTISKAKGQPREPQVYTLPPSRDELTKNQVSLTCLVKGFYPSDIAVEWESNGQPENNYKTTPPVLDSDGSFFLYSKLTVDKSRWQQGNVFSCSVMHEALHNHYTQKSLSLSPGGGGSGGGSAPTSSSTKKTQLQLEHLLLDLQMILNGINNYKNPKLTRMLTFKFYMPKKATELKHLQCLEEELKPLEEVLNLAQSKNFHLRPRDLISNINVIVLELKGSETTFMCEHADETATIVEFLNRWITFIQSIISTLT

SEQ ID NO: 245 - protein, 367 aa, Artificial
  P-0611
DKTHTCPPCPAPEAAGAPSVFLFPPKPKDTLMISRTPEVTCVVVDVSHEDPEVKFNWYVDGVEVHNAKTKPREEQYNSTYRVVSVLTVLHQDWLNGKEYKCKVSNKALPAPIEKTISKAKGQPREPQVYTLPPSRDELTKNQVSLTCLVKGFYPSDIAVEWESNGQPENNYKTTPPVLDSDGSFFLYSKLTVDKSRWQQGNVFSCSVMHEALHNHYTQKSLSLSPGGGGSGGGSAPTSSSTKKTQLQLEHLLLDLQMILNGINNYKNPKLTRMLTFKFYMPKKATELKHLQCLEEELKPLEEVLNLAQSKNFHLRPRDLISNINVIVLELKGSETTFMCELADETATIVEFLNRWITFIQSIISTLT

SEQ ID NO: 246 - protein, 367 aa, Artificial
  P-0612
DKTHTCPPCPAPEAAGAPSVFLFPPKPKDTLMISRTPEVTCVVVDVSHEDPEVKFNWYVDGVEVHNAKTKPREEQYNSTYRVVSVLTVLHQDWLNGKEYKCKVSNKALPAPIEKTISKAKGQPREPQVYTLPPSRDELTKNQVSLTCLVKGFYPSDIAVEWESNGQPENNYKTTPPVLDSDGSFFLYSKLTVDKSRWQQGNVFSCSVMHEALHNHYTQKSLSLSPGGGGSGGGSAPTSSSTKKTQLQLEHLLLDLQMILNGINNYKNPKLTRMLTFKFYMPKKATELKHLQCLEEELKPLEEVLNLAQSKNFHLRPRDLISNINVIVLELKGSETTFMCEVADETATIVEFLNRWITFIQSIISTLT

SEQ ID NO: 247 - protein, 367 aa, Artificial
  P-0573
DKTHTCPPCPAPEAAGAPSVFLFPPKPKDTLMISRTPEVTCVVVDVSHEDPEVKFNWYVDGVEVHNAKTKPREEQYNSTYRVVSVLTVLHQDWLNGKEYKCKVSNKALPAPIEKTISKAKGQPREPQVYTLPPSRDELTKNQVSLTCLVKGFYPSDIAVEWESNGQPENNYKTTPPVLDSDGSFFLYSKLTVDKSRWQQGNVFSCSVMHEALHNHYTQKSLSLSPGGGGSGGGSAPTSSSTKKTQLQLEHLLLDLQMILNGINNYKNPKLTAMLTFKFYMPKKATELKHLQCLEEELKGLEEVLNLAQSKNFHLRPRDLISNINVIVLELKGSETTFMCEYADETATIVEFLNRWITFIQSIISTLT

SEQ ID NO: 248 - protein, 367 aa, Artificial
  P-0613
DKTHTCPPCPAPEAAGAPSVFLFPPKPKDTLMISRTPEVTCVVVDVSHEDPEVKFNWYVDGVEVHNAKTKPREEQYNSTYRVVSVLTVLHQDWLNGKEYKCKVSNKALPAPIEKTISKAKGQPREPQVYTLPPSRDELTKNQVSLTCLVKGFYPSDIAVEWESNGQPENNYKTTPPVLDSDGSFFLYSKLTVDKSRWQQGNVFSCSVMHEALHNHYTQKSLSLSPGGGGSGGGSAPTSSSTKKTQLQLEHLLLDLQMILNGINNYKNPKLTRMLTAKFYMPKKATELKHLQCLEEELKPLEEVLNLAQSKNFHLRPRDLISNINVIVLELKGSETTFMCEYADETATIVEFLNRWITFIQSIISTLT

SEQ ID NO: 249 - protein, 367 aa, Artificial
  P-0614
DKTHTCPPCPAPEAAGAPSVFLFPPKPKDTLMISRTPEVTCVVVDVSHEDPEVKFNWYVDGVEVHNAKTKPREEQYNSTYRVVSVLTVLHQDWLNGKEYKCKVSNKALPAPIEKTISKAKGQPREPQVYTLPPSRDELTKNQVSLTCLVKGFYPSDIAVEWESNGQPENNYKTTPPVLDSDGSFFLYSKLTVDKSRWQQGNVFSCSVMHEALHNHYTQKSLSLSPGGGGSGGGSAPTSSSTKKTQLQLEHLLLDLQMILNGINNYKNPKLTEMLTFKFYMPKKATELKHLQCLEEELKPLEEVLNLAQSKNFHLRPRDLISNINVIVLELKGSETTFMCEYADETATIVEFLNRWITFIQSIISTLT

SEQ ID NO: 250 - protein, 367 aa, Artificial
  Benchmark-4
DKTHTCPPCPAPEAAGAPSVFLFPPKPKDTLMISRTPEVTCVVVDVSHEDPEVKFNWYVDGVEVHNAKTKPREEQYNSTYRVVSVLTVLHQDWLNGKEYKCKVSNKALPAPIEKTISKAKGQPREPQVYTLPPSRDELTKNQVSLTCLVKGFYPSDIAVEWESNGQPENNYKTTPPVLDSDGSFFLYSKLTVDKSRWQQGNVFSCSVMHEALHNHYTQKSLSLSPGGGGSGGGSAPTSSSTKKTQLQLEHLLLDLQMILNGINNYKNPKLTRMLTAKFAMPKKATELKHLQCLEEELKPLEEVLNGAQSKNFHLRPRDLISNINVIVLELKGSETTFMCEYADETATIVEFLNRWITFIQSIISTLT

SEQ ID NO: 251 - protein, 226 aa, Artificial
  Human IgG1-Fc with reduced/abolished effector function and exteded half-life
DKTHTCPPCPAPEAAGGPSVFLFPPKPKDTLYITREPEVTCVVVDVSHEDPEVKFNWYVDGVEVHNAKTKPREEQYNSTYRVVSVLTVLHQDWLNGKEYKCKVSNKALPAPIEKTISKAKGQPREPQVYTLPPSRDELTKNQVSLTCLVKGFYPSDIAVEWESNGQPENNYKTTPPVLDSDGSFFLYSKLTVDKSRWQQGNVFSCSVMHEALHNHYTQKSLSLSPG

SEQ ID NO: 252 - protein, 226 aa, Artificial
  Human IgG1-Fc with reduced/abolished effector function and exteded half-life
DKTHTCPPCPAPEAAGAPSVFLFPPKPKDTLMISRTPEVTCVVVDVSHEDPEVKFNWYVDGVEVHNAKTKPREEQYNSTYRVVSVLTVLHQDWLNGKEYKCKVSNKALPAPIEKTISKAKGQPREPQVYTLPPSRDELTKNQVSLTCLVKGFYPSDIAVEWESNGQPENNYKTTPPVLDSDGSFFLYSKLTVDKSRWQQGNVFSCSVMHEALHAHYTQKSLSLSPG

SEQ ID NO: 253 - protein, 214 aa, Artificial [sequence omitted]

SEQ ID NO: 254 - protein, 448 aa, Artificial
  Tocilizumab-Hole-HC
QVQLQESGPGLVRPSQTLSLTCTVSGYSITSDHAWSWVRQPPGRGLEWIGYISYSGITTYNPSLKSRVTMLRDTSKNQFSLRLSSVTAADTAVYYCARSLARTTAMDYWGQGSLVTVSSASTKGPSVFPLAPSSKSTSGGTAALGCLVKDYFPEPVTVSWNSGALTSGVHTFPAVLQSSGLYSLSSVVTVPSSSLGTQTYICNVNHKPSNTKVDKKVEPKSCDKTHTCPPCPAPEAAGAPSVFLFPPKPKDTLMISRTPEVTCVVVDVSHEDPEVKFNWYVDGVEVHNAKTKPREEQYNSTYRVVSVLTVLHQDWLNGKEYKCKVSNKALPAPIEKTISKAKGQPREPQVYTLPPCRDELTKNQVSLSCAVKGFYPSDIAVEWESNGQPENNYKTTPPVLDSDGSFFLVSKLTVDKSRWQQGNVFSCSVMHEALHNHYTQKSLSLSPG

SEQ ID NO: 255 - protein, 589 aa, Artificial
  Tociluzimab-IL-2-variant-fusion-HC-1
QVQLQESGPGLVRPSQTLSLTCTVSGYSITSDHAWSWVRQPPGRGLEWIGYISYSGITTYNPSLKSRVTMLRDTSKNQFSLRLSSVTAADTAVYYCARSLARTTAMDYWGQGSLVTVSSASTKGPSVFPLAPSSKSTSGGTAALGCLVKDYFPEPVTVSWNSGALTSGVHTFPAVLQSSGLYSLSSVVTVPSSSLGTQTYICNVNHKPSNTKVDKKVEPKSCDKTHTCPPCPAPEAAGAPSVFLFPPKPKDTLMISRTPEVTCVVVDVSHEDPEVKFNWYVDGVEVHNAKTKPREEQYNSTYRVVSVLTVLHQDWLNGKEYKCKVSNKALPAPIEKTISKAKGQPREPQVYTLPPSRDELTKNQVSLTCLVKGFYPSDIAVEWESNGQPENNYKTTPPVLDSDGSFFLYSKLTVDKSRWQQGNVFSCSVMHEALHNHYTQKSLSLSPGGGGSGGGSAPTSSSTKKTQLQLEHLLHDLQMILNGINNYKNPKLTRMLTFKFYMPKKATELKHLQCLEEELKPLEEVLNLAQSKNFHLRPRDLISNINVIVLELKGSETTFMCEYADETATIVEFLNRWITFIESIISTLT

SEQ ID NO: 256 - protein, 589 aa, Artificial
  Tociluzimab-IL-2-variant-fusion-Knob-HC-1
QVQLQESGPGLVRPSQTLSLTCTVSGYSITSDHAWSWVRQPPGRGLEWIGYISYSGITTYNPSLKSRVTMLRDTSKNQFSLRLSSVTAADTAVYYCARSLARTTAMDYWGQGSLVTVSSASTKGPSVFPLAPSSKSTSGGTAALGCLVKDYFPEPVTVSWNSGALTSGVHTFPAVLQSSGLYSLSSVVTVPSSSLGTQTYICNVNHKPSNTKVDKKVEPKSCDKTHTCPPCPAPEAAGAPSVFLFPPKPKDTLMISRTPEVTCVVVDVSHEDPEVKFNWYVDGVEVHNAKTKPREEQYNSTYRVVSVLTVLHQDWLNGKEYKCKVSNKALPAPIEKTISKAKGQPREPQVCTLPPSRDELTKNQVSLWCLVKGFYPSDIAVEWESNGQPENNYKTTPPVLDSDGSFFLYSKLTVDKSRWQQGNVFSCSVMHEALHNHYTQKSLSLSPGGGGSGGGSAPTSSSTKKTQLQLEHLLHDLQMILNGINNYKNPKLTRMLTFKFYMPKKATELKHLQCLEEELKPLEEVLNLAQSKNFHLRPRDLISNINVIVLELKGSETTFMCEYADETATIVEFLNRWITFIESIISTLT

SEQ ID NO: 257 - protein, 589 aa, Artificial
  Tociluzimab-IL-2-variant-fusion-HC-2
QVQLQESGPGLVRPSQTLSLTCTVSGYSITSDHAWSWVRQPPGRGLEWIGYISYSGITTYNPSLKSRVTMLRDTSKNQFSLRLSSVTAADTAVYYCARSLARTTAMDYWGQGSLVTVSSASTKGPSVFPLAPSSKSTSGGTAALGCLVKDYFPEPVTVSWNSGALTSGVHTFPAVLQSSGLYSLSSVVTVPSSSLGTQTYICNVNHKPSNTKVDKKVEPKSCDKTHTCPPCPAPEAAGAPSVFLFPPKPKDTLMISRTPEVTCVVVDVSHEDPEVKFNWYVDGVEVHNAKTKPREEQYNSTYRVVSVLTVLHQDWLNGKEYKCKVSNKALPAPIEKTISKAKGQPREPQVYTLPPSRDELTKNQVSLTCLVKGFYPSDIAVEWESNGQPENNYKTTPPVLDSDGSFFLYSKLTVDKSRWQQGNVFSCSVMHEALHNHYTQKSLSLSPGGGGSGGGSAPTSSSTKKTQLQLEHLLLSLQMILNGINNYKNPKLTRMLTFKFYMPKKATELKHLQCLEEELKPLEEVLNLAQSKNFHLRPRDLISNINVIVLELKGSETTFMCEYADETATIVEFLNRWITFIQSIISTLT

SEQ ID NO: 258 - protein, 589 aa, Artificial
  Tociluzimab-IL-2-variant-fusion-HC-3
QVQLQESGPGLVRPSQTLSLTCTVSGYSITSDHAWSWVRQPPGRGLEWIGYISYSGITTYNPSLKSRVTMLRDTSKNQFSLRLSSVTAADTAVYYCARSLARTTAMDYWGQGSLVTVSSASTKGPSVFPLAPSSKSTSGGTAALGCLVKDYFPEPVTVSWNSGALTSGVHTFPAVLQSSGLYSLSSVVTVPSSSLGTQTYICNVNHKPSNTKVDKKVEPKSCDKTHTCPPCPAPEAAGAPSVFLFPPKPKDTLMISRTPEVTCVVVDVSHEDPEVKFNWYVDGVEVHNAKTKPREEQYNSTYRVVSVLTVLHQDWLNGKEYKCKVSNKALPAPIEKTISKAKGQPREPQVYTLPPSRDELTKNQVSLTCLVKGFYPSDIAVEWESNGQPENNYKTTPPVLDSDGSFFLYSKLTVDKSRWQQGNVFSCSVMHEALHNHYTQKSLSLSPGGGGSGGGSAPTSSSTKKTQLQLEHLLLNLQMILNGINNYKNPKLTRMLTFKFYMPKKATELKHLQCLEEELKPLEEVLNLAQSKNFHLRPRDLISNINVIVLELKGSETTFMCEYADETATIVEFLNRWITFIQSIISTLT

SEQ ID NO: 259 - protein, 589 aa, Artificial
  Tociluzimab-IL-2-variant-fusion-HC-4
QVQLQESGPGLVRPSQTLSLTCTVSGYSITSDHAWSWVRQPPGRGLEWIGYISYSGITTYNPSLKSRVTMLRDTSKNQFSLRLSSVTAADTAVYYCARSLARTTAMDYWGQGSLVTVSSASTKGPSVFPLAPSSKSTSGGTAALGCLVKDYFPEPVTVSWNSGALTSGVHTFPAVLQSSGLYSLSSVVTVPSSSLGTQTYICNVNHKPSNTKVDKKVEPKSCDKTHTCPPCPAPEAAGAPSVFLFPPKPKDTLMISRTPEVTCVVVDVSHEDPEVKFNWYVDGVEVHNAKTKPREEQYNSTYRVVSVLTVLHQDWLNGKEYKCKVSNKALPAPIEKTISKAKGQPREPQVYTLPPSRDELTKNQVSLTCLVKGFYPSDIAVEWESNGQPENNYKTTPPVLDSDGSFFLYSKLTVDKSRWQQGNVFSCSVMHEALHNHYTQKSLSLSPGGGGSGGGSAPTSSSTKKTQLQLEHLLLTLQMILNGINNYKNPKLTRMLTFKFYMPKKATELKHLQCLEEELKPLEEVLNLAQSKNFHLRPRDLISNINVIVLELKGSETTFMCEYADETATIVEFLNRWITFIQSIISTLT

SEQ ID NO: 260 - protein, 589 aa, Artificial
  Tociluzimab-IL-2-variant-fusion-Knob-HC-4
QVQLQESGPGLVRPSQTLSLTCTVSGYSITSDHAWSWVRQPPGRGLEWIGYISYSGITTYNPSLKSRVTMLRDTSKNQFSLRLSSVTAADTAVYYCARSLARTTAMDYWGQGSLVTVSSASTKGPSVFPLAPSSKSTSGGTAALGCLVKDYFPEPVTVSWNSGALTSGVHTFPAVLQSSGLYSLSSVVTVPSSSLGTQTYICNVNHKPSNTKVDKKVEPKSCDKTHTCPPCPAPEAAGAPSVFLFPPKPKDTLMISRTPEVTCVVVDVSHEDPEVKFNWYVDGVEVHNAKTKPREEQYNSTYRVVSVLTVLHQDWLNGKEYKCKVSNKALPAPIEKTISKAKGQPREPQVCTLPPSRDELTKNQVSLWCLVKGFYPSDIAVEWESNGQPENNYKTTPPVLDSDGSFFLYSKLTVDKSRWQQGNVFSCSVMHEALHNHYTQKSLSLSPGGGGSGGGSAPTSSSTKKTQLQLEHLLLTLQMILNGINNYKNPKLTRMLTFKFYMPKKATELKHLQCLEEELKPLEEVLNLAQSKNFHLRPRDLISNINVIVLELKGSETTFMCEYADETATIVEFLNRWITFIQSIISTLT

SEQ ID NO: 261 - protein, 589 aa, Artificial
  Tociluzimab-IL-2-variant-fusion-HC-5
QVQLQESGPGLVRPSQTLSLTCTVSGYSITSDHAWSWVRQPPGRGLEWIGYISYSGITTYNPSLKSRVTMLRDTSKNQFSLRLSSVTAADTAVYYCARSLARTTAMDYWGQGSLVTVSSASTKGPSVFPLAPSSKSTSGGTAALGCLVKDYFPEPVTVSWNSGALTSGVHTFPAVLQSSGLYSLSSVVTVPSSSLGTQTYICNVNHKPSNTKVDKKVEPKSCDKTHTCPPCPAPEAAGAPSVFLFPPKPKDTLMISRTPEVTCVVVDVSHEDPEVKFNWYVDGVEVHNAKTKPREEQYNSTYRVVSVLTVLHQDWLNGKEYKCKVSNKALPAPIEKTISKAKGQPREPQVYTLPPSRDELTKNQVSLTCLVKGFYPSDIAVEWESNGQPENNYKTTPPVLDSDGSFFLYSKLTVDKSRWQQGNVFSCSVMHEALHNHYTQKSLSLSPGGGGSGGGSAPTSSSTKKTQLQLEHLLLTLQMILNGINNYKNPKLTRMLTFKFYMPKKATELKHLQCLEEELKPLEEVLNLAQSKNFHLRPRDLISNINVIVLELKGSETTFMCEYADETATIVEFLNRWITFIESIISTLT

SEQ ID NO: 262 - protein, 589 aa, Artificial
  Tociluzimab-IL-2-variant-fusion-Knob-HC-5
QVQLQESGPGLVRPSQTLSLTCTVSGYSITSDHAWSWVRQPPGRGLEWIGYISYSGITTYNPSLKSRVTMLRDTSKNQFSLRLSSVTAADTAVYYCARSLARTTAMDYWGQGSLVTVSSASTKGPSVFPLAPSSKSTSGGTAALGCLVKDYFPEPVTVSWNSGALTSGVHTFPAVLQSSGLYSLSSVVTVPSSSLGTQTYICNVNHKPSNTKVDKKVEPKSCDKTHTCPPCPAPEAAGAPSVFLFPPKPKDTLMISRTPEVTCVVVDVSHEDPEVKFNWYVDGVEVHNAKTKPREEQYNSTYRVVSVLTVLHQDWLNGKEYKCKVSNKALPAPIEKTISKAKGQPREPQVCTLPPSRDELTKNQVSLWCLVKGFYPSDIAVEWESNGQPENNYKTTPPVLDSDGSFFLYSKLTVDKSRWQQGNVFSCSVMHEALHNHYTQKSLSLSPGGGGSGGGSAPTSSSTKKTQLQLEHLLLTLQMILNGINNYKNPKLTRMLTFKFYMPKKATELKHLQCLEEELKPLEEVLNLAQSKNFHLRPRDLISNINVIVLELKGSETTFMCEYADETATIVEFLNRWITFIESIISTLT

SEQ ID NO: 263 - protein, 589 aa, Artificial
  Tociluzimab-IL-2-variant-fusion-HC-6
QVQLQESGPGLVRPSQTLSLTCTVSGYSITSDHAWSWVRQPPGRGLEWIGYISYSGITTYNPSLKSRVTMLRDTSKNQFSLRLSSVTAADTAVYYCARSLARTTAMDYWGQGSLVTVSSASTKGPSVFPLAPSSKSTSGGTAALGCLVKDYFPEPVTVSWNSGALTSGVHTFPAVLQSSGLYSLSSVVTVPSSSLGTQTYICNVNHKPSNTKVDKKVEPKSCDKTHTCPPCPAPEAAGAPSVFLFPPKPKDTLMISRTPEVTCVVVDVSHEDPEVKFNWYVDGVEVHNAKTKPREEQYNSTYRVVSVLTVLHQDWLNGKEYKCKVSNKALPAPIEKTISKAKGQPREPQVYTLPPSRDELTKNQVSLTCLVKGFYPSDIAVEWESNGQPENNYKTTPPVLDSDGSFFLYSKLTVDKSRWQQGNVFSCSVMHEALHNHYTQKSLSLSPGGGGSGGGSAPTSSSTKKTQLQLEHLLLTLQMILNGINNYKNPKLTRMLTFKFYMPKKATELKHLQCLEEELKPLEEVLNLAQSKNFHLRPRDLISNINVIVLELKGSETTFMCEYADETATIVEFLNRWITFIKSIISTLT

SEQ ID NO: 264 - protein, 589 aa, Artificial
  Tociluzimab-IL-2-variant-fusion-Knob-HC-6
QVQLQESGPGLVRPSQTLSLTCTVSGYSITSDHAWSWVRQPPGRGLEWIGYISYSGITTYNPSLKSRVTMLRDTSKNQFSLRLSSVTAADTAVYYCARSLARTTAMDYWGQGSLVTVSSASTKGPSVFPLAPSSKSTSGGTAALGCLVKDYFPEPVTVSWNSGALTSGVHTFPAVLQSSGLYSLSSVVTVPSSSLGTQTYICNVNHKPSNTKVDKKVEPKSCDKTHTCPPCPAPEAAGAPSVFLFPPKPKDTLMISRTPEVTCVVVDVSHEDPEVKFNWYVDGVEVHNAKTKPREEQYNSTYRVVSVLTVLHQDWLNGKEYKCKVSNKALPAPIEKTISKAKGQPREPQVCTLPPSRDELTKNQVSLWCLVKGFYPSDIAVEWESNGQPENNYKTTPPVLDSDGSFFLYSKLTVDKSRWQQGNVFSCSVMHEALHNHYTQKSLSLSPGGGGSGGGSAPTSSSTKKTQLQLEHLLLTLQMILNGINNYKNPKLTRMLTFKFYMPKKATELKHLQCLEEELKPLEEVLNLAQSKNFHLRPRDLISNINVIVLELKGSETTFMCEYADETATIVEFLNRWITFIKSIISTLT

SEQ ID NO: 265 - protein, 589 aa, Artificial
  Tociluzimab-IL-2-variant-fusion-HC-7
QVQLQESGPGLVRPSQTLSLTCTVSGYSITSDHAWSWVRQPPGRGLEWIGYISYSGITTYNPSLKSRVTMLRDTSKNQFSLRLSSVTAADTAVYYCARSLARTTAMDYWGQGSLVTVSSASTKGPSVFPLAPSSKSTSGGTAALGCLVKDYFPEPVTVSWNSGALTSGVHTFPAVLQSSGLYSLSSVVTVPSSSLGTQTYICNVNHKPSNTKVDKKVEPKSCDKTHTCPPCPAPEAAGAPSVFLFPPKPKDTLMISRTPEVTCVVVDVSHEDPEVKFNWYVDGVEVHNAKTKPREEQYNSTYRVVSVLTVLHQDWLNGKEYKCKVSNKALPAPIEKTISKAKGQPREPQVYTLPPSRDELTKNQVSLTCLVKGFYPSDIAVEWESNGQPENNYKTTPPVLDSDGSFFLYSKLTVDKSRWQQGNVFSCSVMHEALHNHYTQKSLSLSPGGGGSGGGSAPTSSSTKKTQLQLEHLLLQLQMILNGINNYKNPKLTRMLTFKFYMPKKATELKHLQCLEEELKPLEEVLNLAQSKNFHLRPRDLISNINVIVLELKGSETTFMCEYADETATIVEFLNRWITFIQSIISTLT

SEQ ID NO: 266 - protein, 589 aa, Artificial
  Tociluzimab-IL-2-variant-fusion-Knob-HC-7
QVQLQESGPGLVRPSQTLSLTCTVSGYSITSDHAWSWVRQPPGRGLEWIGYISYSGITTYNPSLKSRVTMLRDTSKNQFSLRLSSVTAADTAVYYCARSLARTTAMDYWGQGSLVTVSSASTKGPSVFPLAPSSKSTSGGTAALGCLVKDYFPEPVTVSWNSGALTSGVHTFPAVLQSSGLYSLSSVVTVPSSSLGTQTYICNVNHKPSNTKVDKKVEPKSCDKTHTCPPCPAPEAAGAPSVFLFPPKPKDTLMISRTPEVTCVVVDVSHEDPEVKFNWYVDGVEVHNAKTKPREEQYNSTYRVVSVLTVLHQDWLNGKEYKCKVSNKALPAPIEKTISKAKGQPREPQVCTLPPSRDELTKNQVSLWCLVKGFYPSDIAVEWESNGQPENNYKTTPPVLDSDGSFFLYSKLTVDKSRWQQGNVFSCSVMHEALHNHYTQKSLSLSPGGGGSGGGSAPTSSSTKKTQLQLEHLLLQLQMILNGINNYKNPKLTRMLTFKFYMPKKATELKHLQCLEEELKPLEEVLNLAQSKNFHLRPRDLISNINVIVLELKGSETTFMCEYADETATIVEFLNRWITFIQSIISTLT

SEQ ID NO: 267 - protein, 589 aa, Artificial
  Tociluzimab-IL-2-variant-fusion-HC-8
QVQLQESGPGLVRPSQTLSLTCTVSGYSITSDHAWSWVRQPPGRGLEWIGYISYSGITTYNPSLKSRVTMLRDTSKNQFSLRLSSVTAADTAVYYCARSLARTTAMDYWGQGSLVTVSSASTKGPSVFPLAPSSKSTSGGTAALGCLVKDYFPEPVTVSWNSGALTSGVHTFPAVLQSSGLYSLSSVVTVPSSSLGTQTYICNVNHKPSNTKVDKKVEPKSCDKTHTCPPCPAPEAAGAPSVFLFPPKPKDTLMISRTPEVTCVVVDVSHEDPEVKFNWYVDGVEVHNAKTKPREEQYNSTYRVVSVLTVLHQDWLNGKEYKCKVSNKALPAPIEKTISKAKGQPREPQVYTLPPSRDELTKNQVSLTCLVKGFYPSDIAVEWESNGQPENNYKTTPPVLDSDGSFFLYSKLTVDKSRWQQGNVFSCSVMHEALHNHYTQKSLSLSPGGGGSGGGSAPTSSSTKKTQLQLEHLLNDLQMILNGINNYKNPKLTRMLTFKFYMPKKATELKHLQCLEEELKPLEEVLNLAQSKNFHLRPRDLISNINVIVLELKGSETTFMCEYADETATIVEFLNRWITFIESIISTLT

SEQ ID NO: 268 - protein, 589 aa, Artificial
  Tociluzimab-IL-2-variant-fusion-HC-9
QVQLQESGPGLVRPSQTLSLTCTVSGYSITSDHAWSWVRQPPGRGLEWIGYISYSGITTYNPSLKSRVTMLRDTSKNQFSLRLSSVTAADTAVYYCARSLARTTAMDYWGQGSLVTVSSASTKGPSVFPLAPSSKSTSGGTAALGCLVKDYFPEPVTVSWNSGALTSGVHTFPAVLQSSGLYSLSSVVTVPSSSLGTQTYICNVNHKPSNTKVDKKVEPKSCDKTHTCPPCPAPEAAGAPSVFLFPPKPKDTLMISRTPEVTCVVVDVSHEDPEVKFNWYVDGVEVHNAKTKPREEQYNSTYRVVSVLTVLHQDWLNGKEYKCKVSNKALPAPIEKTISKAKGQPREPQVYTLPPSRDELTKNQVSLTCLVKGFYPSDIAVEWESNGQPENNYKTTPPVLDSDGSFFLYSKLTVDKSRWQQGNVFSCSVMHEALHNHYTQKSLSLSPGGGGSGGGSAPTSSSTKKTQLQLEHLLNDLQMILNGINNYKNPKLTRMLTFKFYMPKKATELKHLQCLEEELKPLEEVLNLAQSKNFHLRPRDLISNINVIVLELKGSETTFMCEYADETATIVEFLNRWITFIKSIISTLT

SEQ ID NO: 269 - protein, 214 aa, Artificial
  Belimumab-L
SSELTQDPAVSVALGQTVRVTCQGDSLRSYYASWYQQKPGQAPVLVIYGKNNRPSGIPDRFSGSSSGNTASLTITGAQAEDEADYYCSSRDSSGNHWVFGGGTELTVLGQPKAAPSVTLFPPSSEELQANKATLVCLISDFYPGAVTVAWKADSSPVKAGVETTTPSKQSNNKYAASSYLSLTPEQWKSHRSYSCQVTHEGSTVEKTVAPTECS

SEQ ID NO: 270 - protein, 452 aa, Artificial
  Belimumab-Hole-HC
QVQLQQSGAEVKKPGSSVRVSCKASGGTFNNNAINWVRQAPGQGLEWMGGIIPMFGTAKYSQNFQGRVAITADESTGTASMELSSLRSEDTAVYYCARSRDLLLFPHHALSPWGRGTMVTVSSASTKGPSVFPLAPSSKSTSGGTAALGCLVKDYFPEPVTVSWNSGALTSGVHTFPAVLQSSGLYSLSSVVTVPSSSLGTQTYICNVNHKPSNTKVDKKVEPKSCDKTHTCPPCPAPEAAGAPSVFLFPPKPKDTLMISRTPEVTCVVVDVSHEDPEVKFNWYVDGVEVHNAKTKPREEQYNSTYRVVSVLTVLHQDWLNGKEYKCKVSNKALPAPIEKTISKAKGQPREPQVYTLPPCRDELTKNQVSLSCAVKGFYPSDIAVEWESNGQPENNYKTTPPVLDSDGSFFLVSKLTVDKSRWQQGNVFSCSVMHEALHNHYTQKSLSLSPG

SEQ ID NO: 271 - protein, 593 aa, Artificial
  Belimumab-IL-2-variant-fusion-HC-1
QVQLQQSGAEVKKPGSSVRVSCKASGGTFNNNAINWVRQAPGQGLEWMGGIIPMFGTAKYSQNFQGRVAITADESTGTASMELSSLRSEDTAVYYCARSRDLLLFPHHALSPWGRGTMVTVSSASTKGPSVFPLAPSSKSTSGGTAALGCLVKDYFPEPVTVSWNSGALTSGVHTFPAVLQSSGLYSLSSVVTVPSSSLGTQTYICNVNHKPSNTKVDKKVEPKSCDKTHTCPPCPAPEAAGAPSVFLFPPKPKDTLMISRTPEVTCVVVDVSHEDPEVKFNWYVDGVEVHNAKTKPREEQYNSTYRVVSVLTVLHQDWLNGKEYKCKVSNKALPAPIEKTISKAKGQPREPQVYTLPPSRDELTKNQVSLTCLVKGFYPSDIAVEWESNGQPENNYKTTPPVLDSDGSFFLYSKLTVDKSRWQQGNVFSCSVMHEALHNHYTQKSLSLSPGGGGSGGGSAPTSSSTKKTQLQLEHLLHDLQMILNGINNYKNPKLTRMLTFKFYMPKKATELKHLQCLEEELKPLEEVLNLAQSKNFHLRPRDLISNINVIVLELKGSETTFMCEYADETATIVEFLNRWITFIESIISTLT

SEQ ID NO: 272 - protein, 593 aa, Artificial
  Belimumab-IL-2-variant-fusion-HC-2
QVQLQQSGAEVKKPGSSVRVSCKASGGTFNNNAINWVRQAPGQGLEWMGGIIPMFGTAKYSQNFQGRVAITADESTGTASMELSSLRSEDTAVYYCARSRDLLLFPHHALSPWGRGTMVTVSSASTKGPSVFPLAPSSKSTSGGTAALGCLVKDYFPEPVTVSWNSGALTSGVHTFPAVLQSSGLYSLSSVVTVPSSSLGTQTYICNVNHKPSNTKVDKKVEPKSCDKTHTCPPCPAPEAAGAPSVFLFPPKPKDTLMISRTPEVTCVVVDVSHEDPEVKFNWYVDGVEVHNAKTKPREEQYNSTYRVVSVLTVLHQDWLNGKEYKCKVSNKALPAPIEKTISKAKGQPREPQVYTLPPSRDELTKNQVSLTCLVKGFYPSDIAVEWESNGQPENNYKTTPPVLDSDGSFFLYSKLTVDKSRWQQGNVFSCSVMHEALHNHYTQKSLSLSPGGGGSGGGSAPTSSSTKKTQLQLEHLLLQLQMILNGINNYKNPKLTRMLTFKFYMPKKATELKHLQCLEEELKPLEEVLNLAQSKNFHLRPRDLISNINVIVLELKGSETTFMCEYADETATIVEFLNRWITFIQSIISTLT

SEQ ID NO: 273 - protein, 593 aa, Artificial
  Belimumab-IL-2-variant-fusion-Knob-HC-3
QVQLQQSGAEVKKPGSSVRVSCKASGGTFNNNAINWVRQAPGQGLEWMGGIIPMFGTAKYSQNFQGRVAITADESTGTASMELSSLRSEDTAVYYCARSRDLLLFPHHALSPWGRGTMVTVSSASTKGPSVFPLAPSSKSTSGGTAALGCLVKDYFPEPVTVSWNSGALTSGVHTFPAVLQSSGLYSLSSVVTVPSSSLGTQTYICNVNHKPSNTKVDKKVEPKSCDKTHTCPPCPAPEAAGAPSVFLFPPKPKDTLMISRTPEVTCVVVDVSHEDPEVKFNWYVDGVEVHNAKTKPREEQYNSTYRVVSVLTVLHQDWLNGKEYKCKVSNKALPAPIEKTISKAKGQPREPQVCTLPPSRDELTKNQVSLWCLVKGFYPSDIAVEWESNGQPENNYKTTPPVLDSDGSFFLYSKLTVDKSRWQQGNVFSCSVMHEALHNHYTQKSLSLSPGGGGSGGGSAPTSSSTKKTQLQLEHLLLQLQMILNGINNYKNPKLTRMLTFKFYMPKKATELKHLQCLEEELKPLEEVLNLAQSKNFHLRPRDLISNINVIVLELKGSETTFMCEYADETATIVEFLNRWITFIQSIISTLT

SEQ ID NO: 274 - protein, 593 aa, Artificial
  Belimumab-IL-2-variant-fusion-Knob-HC-4
QVQLQQSGAEVKKPGSSVRVSCKASGGTFNNNAINWVRQAPGQGLEWMGGIIPMFGTAKYSQNFQGRVAITADESTGTASMELSSLRSEDTAVYYCARSRDLLLFPHHALSPWGRGTMVTVSSASTKGPSVFPLAPSSKSTSGGTAALGCLVKDYFPEPVTVSWNSGALTSGVHTFPAVLQSSGLYSLSSVVTVPSSSLGTQTYICNVNHKPSNTKVDKKVEPKSCDKTHTCPPCPAPEAAGAPSVFLFPPKPKDTLMISRTPEVTCVVVDVSHEDPEVKFNWYVDGVEVHNAKTKPREEQYNSTYRVVSVLTVLHQDWLNGKEYKCKVSNKALPAPIEKTISKAKGQPREPQVCTLPPSRDELTKNQVSLWCLVKGFYPSDIAVEWESNGQPENNYKTTPPVLDSDGSFFLYSKLTVDKSRWQQGNVFSCSVMHEALHNHYTQKSLSLSPGGGGSGGGSAPTSSSTKKTQLQLEHLLRDLQMILNGINNYKNPKLTRMLTFKFYMPKKATELKHLQCLEEELKPLEEVLNLAQSKNFHLRPRDLISNINVIVLELKGSETTFMCEYADETATIVEFLNRWITFIKSIISTLT

SEQ ID NO: 275 - protein, 133 aa, Artificial
  Human IL-2 Q126R variant sequence
APTSSSTKKTQLQLEHLLLDLQMILNGINNYKNPKLTRMLTFKFYMPKKATELKHLQCLEEELKPLEEVLNLAQSKNFHLRPRDLISNINVIVLELKGSETTFMCEYADETATIVEFLNRWITFSRSIISTLT

SEQ ID NO: 276 - protein, 133 aa, Artificial
  Human IL-2 Q126S variant sequence
APTSSSTKKTQLQLEHLLLDLQMILNGINNYKNPKLTRMLTFKFYMPKKATELKHLQCLEEELKPLEEVLNLAQSKNFHLRPRDLISNINVIVLELKGSETTFMCEYADETATIVEFLNRWITFSSSIISTLT

SEQ ID NO: 277 - protein, 133 aa, Artificial
  Human IL-2 Q126T variant sequence
APTSSSTKKTQLQLEHLLLDLQMILNGINNYKNPKLTRMLTFKFYMPKKATELKHLQCLEEELKPLEEVLNLAQSKNFHLRPRDLISNINVIVLELKGSETTFMCEYADETATIVEFLNRWITFSTSIISTLT

SEQ ID NO: 278 - protein, 133 aa, Artificial
  Human IL-2 L19D/S125I/Q126E variant sequence
APTSSSTKKTQLQLEHLLDDLQMILNGINNYKNPKLTRMLTFKFYMPKKATELKHLQCLEEELKPLEEVLNLAQSKNFHLRPRDLISNINVIVLELKGSETTFMCEYADETATIVEFLNRWITFIESIISTLT

SEQ ID NO: 279 - protein, 133 aa, Artificial
  Human IL-2 D20E/S125I/Q126E variant sequence
APTSSSTKKTQLQLEHLLLELQMILNGINNYKNPKLTRMLTFKFYMPKKATELKHLQCLEEELKPLEEVLNLAQSKNFHLRPRDLISNINVIVLELKGSETTFMCEYADETATIVEFLNRWITFIESIISTLT

SEQ ID NO: 280 - protein, 133 aa, Artificial
  Human IL-2 L19N/S125I/Q126E variant sequence
APTSSSTKKTQLQLEHLLNDLQMILNGINNYKNPKLTRMLTFKFYMPKKATELKHLQCLEEELKPLEEVLNLAQSKNFHLRPRDLISNINVIVLELKGSETTFMCEYADETATIVEFLNRWITFIESIISTLT

SEQ ID NO: 281 - protein, 133 aa, Artificial; identical to SEQ ID NO: 42
  Human IL-2 L19N/S125I/Q126K variant sequence

SEQ ID NO: 282 - protein, 133 aa, Artificial
  Human IL-2 L19H/S125I/Q126D variant sequence
APTSSSTKKTQLQLEHLLHDLQMILNGINNYKNPKLTRMLTFKFYMPKKATELKHLQCLEEELKPLEEVLNLAQSKNFHLRPRDLISNINVIVLELKGSETTFMCEYADETATIVEFLNRWITFIDSIISTLT

SEQ ID NO: 283 - protein, 133 aa, Artificial
  Human IL-2 L19H/S125I/Q126H variant sequence
APTSSSTKKTQLQLEHLLHDLQMILNGINNYKNPKLTRMLTFKFYMPKKATELKHLQCLEEELKPLEEVLNLAQSKNFHLRPRDLISNINVIVLELKGSETTFMCEYADETATIVEFLNRWITFIHSIISTLT

SEQ ID NO: 284 - protein, 133 aa, Artificial
  Human IL-2 L19H/S125I/Q126N variant sequence
APTSSSTKKTQLQLEHLLHDLQMILNGINNYKNPKLTRMLTFKFYMPKKATELKHLQCLEEELKPLEEVLNLAQSKNFHLRPRDLISNINVIVLELKGSETTFMCEYADETATIVEFLNRWITFINSIISTLT

SEQ ID NO: 285 - protein, 133 aa, Artificial
  Human IL-2 L19H/S125I/Q126R variant sequence
APTSSSTKKTQLQLEHLLHDLQMILNGINNYKNPKLTRMLTFKFYMPKKATELKHLQCLEEELKPLEEVLNLAQSKNFHLRPRDLISNINVIVLELKGSETTFMCEYADETATIVEFLNRWITFIRSIISTLT

SEQ ID NO: 286 - protein, 133 aa, Artificial
  Human IL-2 L19H/S125I/Q126S variant sequence
APTSSSTKKTQLQLEHLLHDLQMILNGINNYKNPKLTRMLTFKFYMPKKATELKHLQCLEEELKPLEEVLNLAQSKNFHLRPRDLISNINVIVLELKGSETTFMCEYADETATIVEFLNRWITFISSIISTLT

SEQ ID NO: 287 - protein, 133 aa, Artificial
  Human IL-2 L19H/S125I/Q126T variant sequence
APTSSSTKKTQLQLEHLLHDLQMILNGINNYKNPKLTRMLTFKFYMPKKATELKHLQCLEEELKPLEEVLNLAQSKNFHLRPRDLISNINVIVLELKGSETTFMCEYADETATIVEFLNRWITFITSIISTLT

SEQ ID NO: 288 - protein, 128 aa, Artificial
  Human IL-2 L19H/S125I/Q126E + 5-aa N-terminal deletion variant sequence
STKKTQLQLEHLLHDLQMILNGINNYKNPKLTRMLTFKFYMPKKATELKHLQCLEEELKPLEEVLNLAQSKNFHLRPRDLISNINVIVLELKGSETTFMCEYADETATIVEFLNRWITFIESIISTLT

SEQ ID NO: 289 - protein, 126 aa, Artificial
  Human IL-2 L19H/S125I/Q126E + 7-aa N-terminal deletion variant sequence
KKTQLQLEHLLHDLQMILNGINNYKNPKLTRMLTFKFYMPKKATELKHLQCLEEELKPLEEVLNLAQSKNFHLRPRDLISNINVIVLELKGSETTFMCEYADETATIVEFLNRWITFIESIISTLT

SEQ ID NO: 290 - protein, 124 aa, Artificial
  Human IL-2 L19H/S125I/Q126E + 9-aa N-terminal deletion variant sequence
TQLQLEHLLHDLQMILNGINNYKNPKLTRMLTFKFYMPKKATELKHLQCLEEELKPLEEVLNLAQSKNFHLRPRDLISNINVIVLELKGSETTFMCEYADETATIVEFLNRWITFIESIISTLT

SEQ ID NO: 291 - protein, 122 aa, Artificial
  Human IL-2 L19H/S125I/Q126E + 11-aa N-terminal deletion variant sequence
LQLEHLLHDLQMILNGINNYKNPKLTRMLTFKFYMPKKATELKHLQCLEEELKPLEEVLNLAQSKNFHLRPRDLISNINVIVLELKGSETTFMCEYADETATIVEFLNRWITFIESIISTLT

SEQ ID NO: 292 - protein, 133 aa, Artificial
  Human IL-2 L19R/S125I/Q126E variant sequence
APTSSSTKKTQLQLEHLLRDLQMILNGINNYKNPKLTRMLTFKFYMPKKATELKHLQCLEEELKPLEEVLNLAQSKNFHLRPRDLISNINVIVLELKGSETTFMCEYADETATIVEFLNRWITFIESIISTLT

SEQ ID NO: 293 - protein, 133 aa, Artificial
  Human IL-2 P65A/S125I variant sequence
APTSSSTKKTQLQLEHLLLDLQMILNGINNYKNPKLTRMLTFKFYMPKKATELKHLQCLEEELKALEEVLNLAQSKNFHLRPRDLISNINVIVLELKGSETTFMCEYADETATIVEFLNRWITFIQSIISTLT

SEQ ID NO: 294 - protein, 133 aa, Artificial
  Human IL-2 P65E/S125I variant sequence
APTSSSTKKTQLQLEHLLLDLQMILNGINNYKNPKLTRMLTFKFYMPKKATELKHLQCLEEELKELEEVLNLAQSKNFHLRPRDLISNINVIVLELKGSETTFMCEYADETATIVEFLNRWITFIQSIISTLT

SEQ ID NO: 295 - protein, 133 aa, Artificial
  Human IL-2 P65H/S125I variant sequence
APTSSSTKKTQLQLEHLLLDLQMILNGINNYKNPKLTRMLTFKFYMPKKATELKHLQCLEEELKHLEEVLNLAQSKNFHLRPRDLISNINVIVLELKGSETTFMCEYADETATIVEFLNRWITFIQSIISTLT

SEQ ID NO: 296 - protein, 133 aa, Artificial
  Human IL-2 P65K/S125I variant sequence
APTSSSTKKTQLQLEHLLLDLQMILNGINNYKNPKLTRMLTFKFYMPKKATELKHLQCLEEELKKLEEVLNLAQSKNFHLRPRDLISNINVIVLELKGSETTFMCEYADETATIVEFLNRWITFIQSIISTLT

SEQ ID NO: 297 - protein, 133 aa, Artificial
  Human IL-2 P65N/S125I variant sequence
APTSSSTKKTQLQLEHLLLDLQMILNGINNYKNPKLTRMLTFKFYMPKKATELKHLQCLEEELKNLEEVLNLAQSKNFHLRPRDLISNINVIVLELKGSETTFMCEYADETATIVEFLNRWITFIQSIISTLT

SEQ ID NO: 298 - protein, 133 aa, Artificial
  Human IL-2 P65Q/S125I variant sequence
APTSSSTKKTQLQLEHLLLDLQMILNGINNYKNPKLTRMLTFKFYMPKKATELKHLQCLEEELKQLEEVLNLAQSKNFHLRPRDLISNINVIVLELKGSETTFMCEYADETATIVEFLNRWITFIQSIISTLT

SEQ ID NO: 299 - protein, 133 aa, Artificial
  Human IL-2 P65R/S125I variant sequence
APTSSSTKKTQLQLEHLLLDLQMILNGINNYKNPKLTRMLTFKFYMPKKATELKHLQCLEEELKRLEEVLNLAQSKNFHLRPRDLISNINVIVLELKGSETTFMCEYADETATIVEFLNRWITFIQSIISTLT

SEQ ID NO: 300 - protein, 367 aa, Artificial
  P-0860A
DKTHTCPPCPAPEAAGAPSVFLFPPKPKDTLMISRTPEVTCVVVDVSHEDPEVKFNWYVDGVEVHNAKTKPREEQYNSTYRVVSVLTVLHQDWLNGKEYKCKVSNKALPAPIEKTISKAKGQPREPQVYTLPPSRDELTKNQVSLTCLVKGFYPSDIAVEWESNGQPENNYKTTPPVLDSDGSFFLYSKLTVDKSRWQQGNVFSCSVMHEALHNHYTQKSLSLSPGGGGSGGGSAPTSSSTKKTQLQLEHLLDDLQMILNGINNYKNPKLTRMLTFKFYMPKKATELKHLQCLEEELKPLEEVLNLAQSKNFHLRPRDLISNINVIVLELKGSETTFMCEYADETATIVEFLNRWITFIESIISTLT

SEQ ID NO: 301 - protein, 367 aa, Artificial
  P-0861
DKTHTCPPCPAPEAAGAPSVFLFPPKPKDTLMISRTPEVTCVVVDVSHEDPEVKFNWYVDGVEVHNAKTKPREEQYNSTYRVVSVLTVLHQDWLNGKEYKCKVSNKALPAPIEKTISKAKGQPREPQVYTLPPSRDELTKNQVSLTCLVKGFYPSDIAVEWESNGQPENNYKTTPPVLDSDGSFFLYSKLTVDKSRWQQGNVFSCSVMHEALHNHYTQKSLSLSPGGGGSGGGSAPTSSSTKKTQLQLEHLLLELQMILNGINNYKNPKLTRMLTFKFYMPKKATELKHLQCLEEELKPLEEVLNLAQSKNFHLRPRDLISNINVIVLELKGSETTFMCEYADETATIVEFLNRWITFIESIISTLT

SEQ ID NO: 302 - protein, 362 aa, Artificial
  P-0862
DKTHTCPPCPAPEAAGAPSVFLFPPKPKDTLMISRTPEVTCVVVDVSHEDPEVKFNWYVDGVEVHNAKTKPREEQYNSTYRVVSVLTVLHQDWLNGKEYKCKVSNKALPAPIEKTISKAKGQPREPQVYTLPPSRDELTKNQVSLTCLVKGFYPSDIAVEWESNGQPENNYKTTPPVLDSDGSFFLYSKLTVDKSRWQQGNVFSCSVMHEALHNHYTQKSLSLSPGGGGSGGGSSTKKTQLQLEHLLHDLQMILNGINNYKNPKLTRMLTFKFYMPKKATELKHLQCLEEELKPLEEVLNLAQSKNFHLRPRDLISNINVIVLELKGSETTFMCEYADETATIVEFLNRWITFIESIISTLT

SEQ ID NO: 303 - protein, 360 aa, Artificial
  P-0863
DKTHTCPPCPAPEAAGAPSVFLFPPKPKDTLMISRTPEVTCVVVDVSHEDPEVKFNWYVDGVEVHNAKTKPREEQYNSTYRVVSVLTVLHQDWLNGKEYKCKVSNKALPAPIEKTISKAKGQPREPQVYTLPPSRDELTKNQVSLTCLVKGFYPSDIAVEWESNGQPENNYKTTPPVLDSDGSFFLYSKLTVDKSRWQQGNVFSCSVMHEALHNHYTQKSLSLSPGGGGSGGGSKKTQLQLEHLLHDLQMILNGINNYKNPKLTRMLTFKFYMPKKATELKHLQCLEEELKPLEEVLNLAQSKNFHLRPRDLISNINVIVLELKGSETTFMCEYADETATIVEFLNRWITFIESIISTLT

SEQ ID NO: 304 - protein, 358 aa, Artificial
  P-0864
DKTHTCPPCPAPEAAGAPSVFLFPPKPKDTLMISRTPEVTCVVVDVSHEDPEVKFNWYVDGVEVHNAKTKPREEQYNSTYRVVSVLTVLHQDWLNGKEYKCKVSNKALPAPIEKTISKAKGQPREPQVYTLPPSRDELTKNQVSLTCLVKGFYPSDIAVEWESNGQPENNYKTTPPVLDSDGSFFLYSKLTVDKSRWQQGNVFSCSVMHEALHNHYTQKSLSLSPGGGGSGGGSTQLQLEHLLHDLQMILNGINNYKNPKLTRMLTFKFYMPKKATELKHLQCLEEELKPLEEVLNLAQSKNFHLRPRDLISNINVIVLELKGSETTFMCEYADETATIVEFLNRWITFIESIISTLT

SEQ ID NO: 305 - protein, 356 aa, Artificial
  P-0865
DKTHTCPPCPAPEAAGAPSVFLFPPKPKDTLMISRTPEVTCVVVDVSHEDPEVKFNWYVDGVEVHNAKTKPREEQYNSTYRVVSVLTVLHQDWLNGKEYKCKVSNKALPAPIEKTISKAKGQPREPQVYTLPPSRDELTKNQVSLTCLVKGFYPSDIAVEWESNGQPENNYKTTPPVLDSDGSFFLYSKLTVDKSRWQQGNVFSCSVMHEALHNHYTQKSLSLSPGGGGSGGGSLQLEHLLHDLQMILNGINNYKNPKLTRMLTFKFYMPKKATELKHLQCLEEELKPLEEVLNLAQSKNFHLRPRDLISNINVIVLELKGSETTFMCEYADETATIVEFLNRWITFIESIISTLT

SEQ ID NO: 306 - protein, 367 aa, Artificial
  P-0859
DKTHTCPPCPAPEAAGAPSVFLFPPKPKDTLMISRTPEVTCVVVDVSHEDPEVKFNWYVDGVEVHNAKTKPREEQYNSTYRVVSVLTVLHQDWLNGKEYKCKVSNKALPAPIEKTISKAKGQPREPQVYTLPPSRDELTKNQVSLTCLVKGFYPSDIAVEWESNGQPENNYKTTPPVLDSDGSFFLYSKLTVDKSRWQQGNVFSCSVMHEALHNHYTQKSLSLSPGGGGSGGGSAPTSSSTKKTQLQLEHLLNDLQMILNGINNYKNPKLTRMLTFKFYMPKKATELKHLQCLEEELKPLEEVLNLAQSKNFHLRPRDLISNINVIVLELKGSETTFMCEYADETATIVEFLNRWITFIESIISTLT

SEQ ID NO: 307 - protein, 589 aa, Artificial
  Tociluzimab-IL-2-variant-fusion-HC-15
QVQLQESGPGLVRPSQTLSLTCTVSGYSITSDHAWSWVRQPPGRGLEWIGYISYSGITTYNPSLKSRVTMLRDTSKNQFSLRLSSVTAADTAVYYCARSLARTTAMDYWGQGSLVTVSSASTKGPSVFPLAPSSKSTSGGTAALGCLVKDYFPEPVTVSWNSGALTSGVHTFPAVLQSSGLYSLSSVVTVPSSSLGTQTYICNVNHKPSNTKVDKKVEPKSCDKTHTCPPCPAPEAAGAPSVFLFPPKPKDTLMISRTPEVTCVVVDVSHEDPEVKFNWYVDGVEVHNAKTKPREEQYNSTYRVVSVLTVLHQDWLNGKEYKCKVSNKALPAPIEKTISKAKGQPREPQVYTLPPSRDELTKNQVSLTCLVKGFYPSDIAVEWESNGQPENNYKTTPPVLDSDGSFFLYSKLTVDKSRWQQGNVFSCSVMHEALHNHYTQKSLSLSPGGGGSGGGSAPTSSSTKKTQLQLEHLLHDLQMILNGINNYKNPKLTRMLTFKFYMPKKATELKHLQCLEEELKPLEEVLNLAQSKNFHLRPRDLISNINVIVLELKGSETTFMCEYADETATIVEFLNRWITFITSIISTLT

SEQ ID NO: 308 - protein, 589 aa, Artificial
  Tociluzimab-IL-2-variant-fusion-HC-10
QVQLQESGPGLVRPSQTLSLTCTVSGYSITSDHAWSWVRQPPGRGLEWIGYISYSGITTYNPSLKSRVTMLRDTSKNQFSLRLSSVTAADTAVYYCARSLARTTAMDYWGQGSLVTVSSASTKGPSVFPLAPSSKSTSGGTAALGCLVKDYFPEPVTVSWNSGALTSGVHTFPAVLQSSGLYSLSSVVTVPSSSLGTQTYICNVNHKPSNTKVDKKVEPKSCDKTHTCPPCPAPEAAGAPSVFLFPPKPKDTLMISRTPEVTCVVVDVSHEDPEVKFNWYVDGVEVHNAKTKPREEQYNSTYRVVSVLTVLHQDWLNGKEYKCKVSNKALPAPIEKTISKAKGQPREPQVYTLPPSRDELTKNQVSLTCLVKGFYPSDIAVEWESNGQPENNYKTTPPVLDSDGSFFLYSKLTVDKSRWQQGNVFSCSVMHEALHNHYTQKSLSLSPGGGGSGGGSAPTSSSTKKTQLQLEHLLHDLQMILNGINNYKNPKLTRMLTFKFYMPKKATELKHLQCLEEELKPLEEVLNLAQSKNFHLRPRDLISNINVIVLELKGSETTFMCEYADETATIVEFLNRWITFIDSIISTLT

SEQ ID NO: 309 - protein, 589 aa, Artificial
  Tociluzimab-IL-2-variant-fusion-HC-11
QVQLQESGPGLVRPSQTLSLTCTVSGYSITSDHAWSWVRQPPGRGLEWIGYISYSGITTYNPSLKSRVTMLRDTSKNQFSLRLSSVTAADTAVYYCARSLARTTAMDYWGQGSLVTVSSASTKGPSVFPLAPSSKSTSGGTAALGCLVKDYFPEPVTVSWNSGALTSGVHTFPAVLQSSGLYSLSSVVTVPSSSLGTQTYICNVNHKPSNTKVDKKVEPKSCDKTHTCPPCPAPEAAGAPSVFLFPPKPKDTLMISRTPEVTCVVVDVSHEDPEVKFNWYVDGVEVHNAKTKPREEQYNSTYRVVSVLTVLHQDWLNGKEYKCKVSNKALPAPIEKTISKAKGQPREPQVYTLPPSRDELTKNQVSLTCLVKGFYPSDIAVEWESNGQPENNYKTTPPVLDSDGSFFLYSKLTVDKSRWQQGNVFSCSVMHEALHNHYTQKSLSLSPGGGGSGGGSAPTSSSTKKTQLQLEHLLHDLQMILNGINNYKNPKLTRMLTFKFYMPKKATELKHLQCLEEELKPLEEVLNLAQSKNFHLRPRDLISNINVIVLELKGSETTFMCEYADETATIVEFLNRWITFIHSIISTLT

SEQ ID NO: 310 - protein, 589 aa, Artificial
  Tociluzimab-IL-2-variant-fusion-HC-12
QVQLQESGPGLVRPSQTLSLTCTVSGYSITSDHAWSWVRQPPGRGLEWIGYISYSGITTYNPSLKSRVTMLRDTSKNQFSLRLSSVTAADTAVYYCARSLARTTAMDYWGQGSLVTVSSASTKGPSVFPLAPSSKSTSGGTAALGCLVKDYFPEPVTVSWNSGALTSGVHTFPAVLQSSGLYSLSSVVTVPSSSLGTQTYICNVNHKPSNTKVDKKVEPKSCDKTHTCPPCPAPEAAGAPSVFLFPPKPKDTLMISRTPEVTCVVVDVSHEDPEVKFNWYVDGVEVHNAKTKPREEQYNSTYRVVSVLTVLHQDWLNGKEYKCKVSNKALPAPIEKTISKAKGQPREPQVYTLPPSRDELTKNQVSLTCLVKGFYPSDIAVEWESNGQPENNYKTTPPVLDSDGSFFLYSKLTVDKSRWQQGNVFSCSVMHEALHNHYTQKSLSLSPGGGGSGGGSAPTSSSTKKTQLQLEHLLHDLQMILNGINNYKNPKLTRMLTFKFYMPKKATELKHLQCLEEELKPLEEVLNLAQSKNFHLRPRDLISNINVIVLELKGSETTFMCEYADETATIVEFLNRWITFINSIISTLT

SEQ ID NO: 311 - protein, 589 aa, Artificial
  Tociluzimab-IL-2-variant-fusion-HC-13
QVQLQESGPGLVRPSQTLSLTCTVSGYSITSDHAWSWVRQPPGRGLEWIGYISYSGITTYNPSLKSRVTMLRDTSKNQFSLRLSSVTAADTAVYYCARSLARTTAMDYWGQGSLVTVSSASTKGPSVFPLAPSSKSTSGGTAALGCLVKDYFPEPVTVSWNSGALTSGVHTFPAVLQSSGLYSLSSVVTVPSSSLGTQTYICNVNHKPSNTKVDKKVEPKSCDKTHTCPPCPAPEAAGAPSVFLFPPKPKDTLMISRTPEVTCVVVDVSHEDPEVKFNWYVDGVEVHNAKTKPREEQYNSTYRVVSVLTVLHQDWLNGKEYKCKVSNKALPAPIEKTISKAKGQPREPQVYTLPPSRDELTKNQVSLTCLVKGFYPSDIAVEWESNGQPENNYKTTPPVLDSDGSFFLYSKLTVDKSRWQQGNVFSCSVMHEALHNHYTQKSLSLSPGGGGSGGGSAPTSSSTKKTQLQLEHLLHDLQMILNGINNYKNPKLTRMLTFKFYMPKKATELKHLQCLEEELKPLEEVLNLAQSKNFHLRPRDLISNINVIVLELKGSETTFMCEYADETATIVEFLNRWITFIRSIISTLT

SEQ ID NO: 312 - protein, 589 aa, Artificial
  Tociluzimab-IL-2-variant-fusion-HC-14
QVQLQESGPGLVRPSQTLSLTCTVSGYSITSDHAWSWVRQPPGRGLEWIGYISYSGITTYNPSLKSRVTMLRDTSKNQFSLRLSSVTAADTAVYYCARSLARTTAMDYWGQGSLVTVSSASTKGPSVFPLAPSSKSTSGGTAALGCLVKDYFPEPVTVSWNSGALTSGVHTFPAVLQSSGLYSLSSVVTVPSSSLGTQTYICNVNHKPSNTKVDKKVEPKSCDKTHTCPPCPAPEAAGAPSVFLFPPKPKDTLMISRTPEVTCVVVDVSHEDPEVKFNWYVDGVEVHNAKTKPREEQYNSTYRVVSVLTVLHQDWLNGKEYKCKVSNKALPAPIEKTISKAKGQPREPQVYTLPPSRDELTKNQVSLTCLVKGFYPSDIAVEWESNGQPENNYKTTPPVLDSDGSFFLYSKLTVDKSRWQQGNVFSCSVMHEALHNHYTQKSLSLSPGGGGSGGGSAPTSSSTKKTQLQLEHLLHDLQMILNGINNYKNPKLTRMLTFKFYMPKKATELKHLQCLEEELKPLEEVLNLAQSKNFHLRPRDLISNINVIVLELKGSETTFMCEYADETATIVEFLNRWITFISSIISTLT

SEQ ID NO: 313 - protein, 165 aa, Artificial
  TACI extracelluar domain
MSGLGRSRRGGRSRVDQEERFPQGLWTGVAMRSCPEEQYWDPLLGTCMSCKTICNHQSQRTCAAFCRSLSCRKEQGKFYDHLLRDCISCASICGQHPKQCAYFCENKLRSPVNLPPELRRQRSGEVENNSDNSGRYQGLEHRGSEASPALPGLKLSADQVALVYS

SEQ ID NO: 314 - protein, 81 aa, Artificial
  TACI functional fragment (ECD amino acid 30-110)
AMRSCPEEQYWDPLLGTCMSCKTICNHQSQRTCAAFCRSLSCRKEQGKFYDHLLRDCISCASICGQHPKQCAYFCENKLRS

SEQ ID NO: 315 - protein, 454 aa, Artificial
  IL-2 variant TACI bifunctional fusion protein 1
AMRSCPEEQYWDPLLGTCMSCKTICNHQSQRTCAAFCRSLSCRKEQGKFYDHLLRDCISCASICGQHPKQCAYFCENKLRSEPKSSDKTHTCPPCPAPEAAGAPSVFLFPPKPKDTLMISRTPEVTCVVVDVSHEDPEVKFNWYVDGVEVHNAKTKPREEQYNSTYRVVSVLTVLHQDWLNGKEYKCKVSNKALPAPIEKTISKAKGQPREPQVYTLPPSRDELTKNQVSLTCLVKGFYPSDIAVEWESNGQPENNYKTTPPVLDSDGSFFLYSKLTVDKSRWQQGNVFSCSVMHEALHNHYTQKSLSLSPGGGGSGGGGSAPTSSSTKKTQLQLEHLLHDLQMILNGINNYKNPKLTRMLTFKFYMPKKATELKHLQCLEEELKPLEEVLNLAQSKNFHLRPRDLISNINVIVLELKGSETTFMCEYADETATIVEFLNRWITFIDSIISTLT

SEQ ID NO: 316 - protein, 454 aa, Artificial
  IL-2 variant TACI bifunctional fusion protein 2
AMRSCPEEQYWDPLLGTCMSCKTICNHQSQRTCAAFCRSLSCRKEQGKFYDHLLRDCISCASICGQHPKQCAYFCENKLRSEPKSSDKTHTCPPCPAPEAAGAPSVFLFPPKPKDTLMISRTPEVTCVVVDVSHEDPEVKFNWYVDGVEVHNAKTKPREEQYNSTYRVVSVLTVLHQDWLNGKEYKCKVSNKALPAPIEKTISKAKGQPREPQVYTLPPSRDELTKNQVSLTCLVKGFYPSDIAVEWESNGQPENNYKTTPPVLDSDGSFFLYSKLTVDKSRWQQGNVFSCSVMHEALHNHYTQKSLSLSPGGGGSGGGGSAPTSSSTKKTQLQLEHLLNDLQMILNGINNYKNPKLTRMLTFKFYMPKKATELKHLQCLEEELKPLEEVLNLAQSKNFHLRPRDLISNINVIVLELKGSETTFMCEYADETATIVEFLNRWITFIESIISTLT

SEQ ID NO: 317 - protein, 454 aa, Artificial
  IL-2 variant TACI bifunctional fusion protein 3
AMRSCPEEQYWDPLLGTCMSCKTICNHQSQRTCAAFCRSLSCRKEQGKFYDHLLRDCISCASICGQHPKQCAYFCENKLRSEPKSSDKTHTCPPCPAPEAAGAPSVFLFPPKPKDTLMISRTPEVTCVVVDVSHEDPEVKFNWYVDGVEVHNAKTKPREEQYNSTYRVVSVLTVLHQDWLNGKEYKCKVSNKALPAPIEKTISKAKGQPREPQVYTLPPSRDELTKNQVSLTCLVKGFYPSDIAVEWESNGQPENNYKTTPPVLDSDGSFFLYSKLTVDKSRWQQGNVFSCSVMHEALHNHYTQKSLSLSPGGGGSGGGGSAPTSSSTKKTQLQLEHLLRDLQMILNGINNYKNPKLTRMLTFKFYMPKKATELKHLQCLEEELKPLEEVLNLAQSKNFHLRPRDLISNINVIVLELKGSETTFMCEYADETATIVEFLNRWITFIESIISTLT

SEQ ID NO: 318 - protein, 454 aa, Artificial
  IL-2 variant TACI bifunctional fusion protein 4
AMRSCPEEQYWDPLLGTCMSCKTICNHQSQRTCAAFCRSLSCRKEQGKFYDHLLRDCISCASICGQHPKQCAYFCENKLRSEPKSSDKTHTCPPCPAPEAAGAPSVFLFPPKPKDTLMISRTPEVTCVVVDVSHEDPEVKFNWYVDGVEVHNAKTKPREEQYNSTYRVVSVLTVLHQDWLNGKEYKCKVSNKALPAPIEKTISKAKGQPREPQVYTLPPSRDELTKNQVSLTCLVKGFYPSDIAVEWESNGQPENNYKTTPPVLDSDGSFFLYSKLTVDKSRWQQGNVFSCSVMHEALHNHYTQKSLSLSPGGGGSGGGGSAPTSSSTKKTQLQLEHLLDDLQMILNGINNYKNPKLTRMLTFKFYMPKKATELKHLQCLEEELKPLEEVLNLAQSKNFHLRPRDLISNINVIVLELKGSETTFMCEYADETATIVEFLNRWITFIESIISTLT

SEQ ID NO: 319 - protein, 454 aa, Artificial
  IL-2 variant TACI bifunctional fusion protein 5
AMRSCPEEQYWDPLLGTCMSCKTICNHQSQRTCAAFCRSLSCRKEQGKFYDHLLRDCISCASICGQHPKQCAYFCENKLRSEPKSSDKTHTCPPCPAPEAAGAPSVFLFPPKPKDTLMISRTPEVTCVVVDVSHEDPEVKFNWYVDGVEVHNAKTKPREEQYNSTYRVVSVLTVLHQDWLNGKEYKCKVSNKALPAPIEKTISKAKGQPREPQVYTLPPSRDELTKNQVSLTCLVKGFYPSDIAVEWESNGQPENNYKTTPPVLDSDGSFFLYSKLTVDKSRWQQGNVFSCSVMHEALHNHYTQKSLSLSPGGGGSGGGGSAPTSSSTKKTQLQLEHLLLQLQMILNGINNYKNPKLTRMLTFKFYMPKKATELKHLQCLEEELKPLEEVLNLAQSKNFHLRPRDLISNINVIVLELKGSETTFMCEYADETATIVEFLNRWITFIESIISTLT

SEQ ID NO: 320 - protein, 445 aa, Artificial
  IL-2 variant TACI bifunctional fusion protein 6
AMRSCPEEQYWDPLLGTCMSCKTICNHQSQRTCAAFCRSLSCRKEQGKFYDHLLRDCISCASICGQHPKQCAYFCENKLRSEPKSSDKTHTCPPCPAPEAAGAPSVFLFPPKPKDTLMISRTPEVTCVVVDVSHEDPEVKFNWYVDGVEVHNAKTKPREEQYNSTYRVVSVLTVLHQDWLNGKEYKCKVSNKALPAPIEKTISKAKGQPREPQVYTLPPSRDELTKNQVSLTCLVKGFYPSDIAVEWESNGQPENNYKTTPPVLDSDGSFFLYSKLTVDKSRWQQGNVFSCSVMHEALHNHYTQKSLSLSPGGGGSGGGGSTQLQLEHLLHDLQMILNGINNYKNPKLTRMLTFKFYMPKKATELKHLQCLEEELKPLEEVLNLAQSKNFHLRPRDLISNINVIVLELKGSETTFMCEYADETATIVEFLNRWITFIESIISTLT

1-34. (canceled)

35. An isolated fusion protein comprising 1) an IL-2 variant polypeptide and 2) a heterologous protein, wherein said IL-2 variant polypeptide demonstrates a reduced ability or is incapable of binding to and activating the IL-2Rβγ receptor complex as compared to the polypeptide represented by SEQ ID NO: 3, yet retains the ability to activate the IL-2αβγ receptor complex; wherein said heterologous protein comprises a target/dual functional moiety which targets a molecule enriched in a target tissue; wherein said IL-2 variant polypeptide is fused at its N-terminal amino acid to the C-terminal amino acid of the heterologous protein, or wherein said IL-2 variant polypeptide is fused at its C-terminal amino acid to the N-terminal amino acid of a said heterologous protein, optionally through a peptide linker, as a monomeric or a dimeric form.

36. The isolated fusion protein according to claim 35, wherein said IL-2 variant polypeptide comprises the amino acid sequence of SEQ ID NO: 3 having one or more of amino acid residues position L19, D20, L21, Q22, R38, F42, N88, S125 or Q126 substituted with another amino acid.

37. The isolated fusion protein according to claim 36, wherein the amino acid substitution is selected from the group consisting of: the substitution of L19D, L19H, L19N, L19P, L19Q, L19R, L19S, L19Y at position 19, the substitution of D20E, D20I, D20N, D20Q, D20S, D20T, D20Y at position 20, the substitution of L21S, L21R, L21N at position 21, the substitution of Q22N, Q22H, Q22K, Q22Y, Q22I at position 22, the substitution of N88E, N88G, N88T, N88M, N88Q, N88R, N881 at position 88, the substitution of S125E, S125K, S125H, S125W, S125I at position 125, and the substitution of Q126D, Q126E, Q126H, Q126K, Q126L, Q126M, Q126N, Q126Y, Q126R, Q126S, Q126T at position 126.

38. The isolated fusion protein according to claim 36, wherein said IL-2 variant polypeptide comprises three amino acid substitutions at amino acid residues position L19, S125 and Q126 of SEQ ID NO: 3, wherein the amino acid substitution is selected from the group consisting of: the substitution of L19D, L19H, L19N, L19Q, L19R, L19S, L19P, L19Y at position 19, the substitution of S125E, S125K, S125H, S125W, S125I at position 125, and the substitution of Q126D, Q126E, Q126H, Q126K, Q126L, Q126M, Q126N, Q126Y, Q126K, Q126S, Q126T at position 126 of SEQ ID NO: 3.

39. The isolated fusion protein according to claim 36, wherein said IL-2 variant polypeptide comprises two or three amino acid substitutions at amino acid residues position D20, S125 and Q126 of SEQ ID NO: 3.

40. The isolated fusion protein according to claim 35, wherein the targeted molecule is selected from the group consisting of: inflammatory tissue target, immune cell target, PD-1, PDL1, CTLA4, TIGIT, IL-6R, IL-6, CD20, TNF, integrin α₄β₇, β₇, MAdCAM-1, BLYS (BAFF), TSLP, APRIL, TACI, an autoimmune modulator and an inflammation modulator.

41. The isolated fusion protein according to claim 35, wherein the targeted molecule is selected from the group consisting of: an soluble CTLA4 or its variant; an soluble TACI or its variant; an soluble TIGIT or its variant; an soluble TNF receptor or its variant; and an soluble PD-L1 or its variant.

42. The isolated fusion protein according to claim 35, wherein the heterologous protein is selected from the group consisting of an antibody, an antibody heavy chain or light chain, an antibody fragment, a protein, and a peptide targeting a molecule enriched in the target tissue.

43. The isolated fusion protein according to claim 35, wherein the heterologous protein exhibits binding to a diseased cell or disease microenvironment.

44. An isolated fusion protein comprising 1) an IL-2 variant polypeptide and 2) a heterologous protein, wherein said IL-2 variant polypeptide no longer preferentially activates Tregs as compared to the polypeptide represented by SEQ ID NO: 3, while retaining the ability to activate the IL-2αβγ receptor complex; wherein said heterologous protein comprises a target/dual functional moiety which targets a molecule enriched in a target tissue; wherein said IL-2 variant polypeptide is fused at its N-terminal amino acid to the C-terminal amino acid of the heterologous protein, or wherein said IL-2 variant polypeptide is fused at its C-terminal amino acid to the N-terminal amino acid of a said heterologous protein, optionally through a peptide linker, as a monomeric or a dimeric form.

45. The isolated fusion protein of claim 44, wherein said IL-2 variant polypeptide comprises the amino acid sequence of SEQ ID NO: 3 having one or more of amino acid residues position L19, R38, T41, F42, F44, P65, Y107 or S125 substituted with another amino acid.

46. The isolated fusion protein according to claim 45, wherein the amino acid substitution is selected from the group consisting of: the substitution of L19D, L19H, L19N, L19Q, L19R, L19S, L19P, L19Y at position 19, the substitution of R38E, R38A at position 38, the substitution of T41A, T41G, T41V at position 41, the substitution of F42A at position 42, the substitution of F44G, F44V at position 44, the substitution of P65G, P65A, P65E, P65H, P65K, P65N, P65Q, P65R at position 65, the substitution of Y107G, Y107H, Y107L, Y107V at position 107, the substitution of S125I at position 125 of SEQ ID NO: 3, and any combination of these substitutions.

47. The isolated fusion protein according to claim 44, wherein the targeted molecule is selected from the group consisting of: an soluble CTLA4 or its variant; an soluble TACI or its variant; an soluble TIGIT or its variant; an soluble TNF receptor or its variant; and an soluble PD-L1 or its variant.

48. The isolated fusion protein according to claim 44, wherein the heterologous protein is selected from the group consisting of an antibody, an antibody heavy chain or light chain, an antibody fragment, a protein, and a peptide targeting a molecule enriched in the target tissue.

49. The isolated fusion protein according to claim 44, wherein the heterologous protein exhibits binding to a diseased cell or disease microenvironment.

50. The isolated fusion protein according to claim 48, wherein the antibody is selected from the group consisting of: an agonistic Programmed Death-1 (PD-1) antibody or antibody fragment or an PD-1 binder; an CTLA4 agonistic antibody or an antibody fragment or an CTLA4 binder; TIGIT agonistic antibody or antibody fragment, and an TIGIT binder.

51. The isolated fusion protein according to claim 48, wherein the antibody is selected from the group consisting of: an CD20 antibody or antibody fragment; an IL-6R antibody or antibody fragment; an integrin α₄β₇ antibody or antibody fragment; an β₇ antibody or antibody fragment; and an MAdCAM-1 antibody or antibody fragment, an Blys(BAFF) antibody or antibody fragment or an BLYS binder.

52. A pharmaceutical composition selected from the group consisting of a pharmaceutical composition comprising an isolated fusion protein according to claim 35 in admixture with a pharmaceutically acceptable carrier, and a pharmaceutical composition comprising an isolated fusion protein according to claim 44 in admixture with a pharmaceutically acceptable carrier.

53. A method of treating a disease selected from the group consisting of autoimmune disease, rejection of organ transplantation, inflammatory disease, and cancer in a subject, comprising administering to the subject a therapeutically effective amount of the pharmaceutical composition according to claim 52.

54. An isolated nucleic acid molecule encoding a fusion molecule wherein the fusion molecule is selected from a fusion molecule according to claim 35, and a fusion molecule according to claim 44.
